(19) United States
(12) Patent Application Publication
(10) Pub. No.: US 2015/0105452 A1
(43) Pub. Date: Apr. 16, 2015

(54) Aptamers to PDGF and VEGF and Their Use in Treating PDGF and VEGF Mediated Conditions

(71) Applicant: SomaLogic, Inc., Boulder, CO (US)

(72) Inventors: Thale C. Jarvis, Boulder, CO (US); John C. Rohloff, Boulder, CO (US); Amy D. Gelinas, Lafayette, CO (US); Chi Zhang, Superior, CO (US); Daniel W. Drolet, Boulder, CO (US); Sheela M. Waugh, Erie, CO (US); Nebojsa Janjic, Boulder, CO (US)

(21) Appl. No.: 14/381,679

(22) PCT Filed: Mar. 28, 2013
(86) PCT No.: PCT/US13/34493

§ 371 Date: Aug. 28, 2014

Related U.S. Application Data
(60) Provisional application No. 61/616,881, filed on Mar. 28, 2012.
(60) Provisional application No. 61/648,394, filed on May 17, 2012.
(60) Provisional application No. 61/719,354, filed on Oct. 26, 2012.
(60) Provisional application No. 61/722,099, filed on Nov. 2, 2012.

(51) Int. Cl. C12N 15/115

(52) U.S. Cl. CPC C12N 15/115; C12N 2310/16; C12N 2310/321
USPC 514/44 R; 536/23.1

(57) ABSTRACT

Aptamers that bind PDGF and aptamers that bind VEGF are provided. In addition, aptamer constructs comprising a PDGF aptamer and a VEGF aptamer are provided. Pharmaceutical compositions comprising the aptamers and aptamer constructs are provided, as well as methods of treating conditions using the aptamers and aptamer constructs.

### FIELD OF THE INVENTION

[0001] The present disclosure relates generally to the field of nucleic acids and more particularly to aptamers capable of binding to platelet-derived growth factor (PDGF) and aptamers capable of binding to vascular endothelial growth factor (VEGF). In some embodiments, such aptamers are useful as therapeutics for preventing, treating, and/or ameliorating proliferative disorders, including, but not limited to, atherosclerosis, macular degeneration, fibrosis, cancer, and other disorders in which PDGF and/or VEGF has been implicated. In some embodiments, the present disclosure relates to aptamer constructs that are capable of binding to VEGF and PDGF, either simultaneously or in a mutually exclusive manner, and are useful as therapeutics.

### BACKGROUND

[0002] The following description provides a summary, of information, and is not an admission that any of the information provided or publications referenced herein is prior art to the present disclosure.

[0003] Platelet-derived growth factors (PDGF-A, -B, -C and -D) are ubiquitous mitogens and chemotactic factors for many connective tissue cells (Fredriksson, L., et al. (2004) Cytokine Growth Factor Rev. 15(4):197). PDGFs occur as disulfide-linked dimers and contain a cysteine-knot-fold growth factor domain that functions through binding to PDGF receptors α and β on the surface of a cell (Claes son-Welsh, L., et al. (1989) Proc. Natl. Acad. Sci. USA 86:4917). PDGF binding induces receptor dimerization, which leads to autophosphorylation at intracellular tyrosine residues (Claesson-Welsh, J. (1994) Biol. Chem. 269:32023). PDGF-BB is involved in several proliferative disorders, including atherosclerosis, fibrosis, macular degeneration, and cancer (Östman, A., et al. (2001) Adv. Cancer Res. 80:1; Appelmann, I., et al. (2010) Recent Results Cancer Res. 180:51; Trojanowska, M., et al. (2008) Rheumatology (Oxford) 47(Suppl 5):2; Rutherford et al. (1997) Atherosclerosis 130:45; Smits et al. (1992) Am. J. Pathol. 140:639; Heldin et al. (1991) Endocrinology 129:2187; Floege and Johnson (1995) Miner. Electrolyte Metab. 21:271; Raines et al. (1990) Experimental Pharmacology, Peptide Growth Factors and Their Receptors, Sporn & Roberts, pp. 173-262, Springer, Heidelberg).

[0004] VEGF is a secreted disulfide-linked homodimer that selectively stimulates endothelial cells to proliferate, migrate and produce matrix-degrading enzymes, all of which are processes required for the formation of new blood vessels (Conn, G., et al. (1990) Proc. Natl. Acad. Sci. USA 87:1323; Ferrara, N. et al. (1989) Biochem. Biophys. Res. Commun. 161:851; Gospodarowicz, D., et al. (1989) Proc. Natl. Acad. Sci. USA 86:7311; Pepper, M. S., et al. (1991) Biochem. Biophys. Res. Commun. 181:902; Unemori, E. N., et al. (1992) J. Cell. Physiol. 153:557). In addition to being the only known endothelial cell-specific mitogen, VEGF is unique among angiogenic growth factors in its ability to induce a transient increase in blood vessel permeability to macromolecules (Dvorak, H. F., et al. (1979) J. Immunol. 122:166; Senger, D. R., et al. (1983) Science 219:983; Senger, D. R., et al. (1986) Cancer Res. 46:5629). Increased vascular permeability and the resulting deposition of plasma proteins in the extravascular space facilitate new vessel formation by providing a provisional matrix for the migration of endothelial cells. Hyperpermeability is indeed a characteristic feature of new vessels (Dvorak, H. F., et al. (1995) Am. J. Pathol. 146:1029). Furthermore, compensatory angiogenesis induced by tissue hypoxia is also mediated by VEGF (Levy, A. P., et al. (1996) J. Biol. Chem. 271:2746; Shweiki, D., et al. (1991) Nature 359:843). The identification of VEGF as a hypoxia-inducible protein, along with the complementary observation that hyperoxia causes suppression of VEGF expression, provides an appealing mechanism for matching oxygen demand with vascular supply (Benjamin, L. E., et al. (1999) J. Clin. Invest. 103:159; Alon, T., et al. (1995) Nat. Med. 1:1024).

[0005] Several isoforms of VEGF protein occur as a result of alternative splicing of the eight exons of the gene that encodes VEGF (Eming, S. A., et al. (2006) J. Invest. Dermatol. Symp. Proc. 11:79). The most prevalent isoforms are VEGF-121, VEGF-165 and VEGF-189. Proteolytic processing of VEGF can generate additional isoforms. VEGF-165 can be cleaved by plasmin between Arg-110 and Ala-111 to generate VEGF-110, which is functionally equivalent to VEGF-121 (Keyt, B. A., et al. (1996) J. Biol. Chem. 271:7788). VEGF-189 can be cleaved by urokinase within the exon 6 domain and then can be cleaved further by plasmin to generate VEGF-110 (Plouët, J., et al., (1997) J. Biol. Chem. 272:13390). In addition, a subset of matrix metalloproteases (MMPs), including MMP-3, -7, -9 and -19, are capable of cleaving VEGF-165 and VEGF-189 in sequential steps to generate VEGF-113, which is functionally equivalent to VEGF-110. Therefore, the relative abundance of matrix-bound and diffusible forms of VEGF in a given tissue is determined by the combination of alternative splicing and proteolytic processing that occurs in the cells of the tissue (Ferrara, N., et al. (2006) Retina 26:859).

[0006] Age-related macular degeneration (AMD) remains the leading cause of blindness in people over 55 years of age. The disease is characterized by the formation of insoluble deposits called drusen within the macula, the part of the retina that has the highest density of photoreceptors and is involved in central vision. In the initial stages of AMD, the deposits are avascular and the disease generally progresses slowly. However, in about 10% of the patients, this so-called “dry” form of AMD becomes vascularized and turns into the “wet” form of AMD, during which the disease becomes more progressive and vision deteriorates at a faster rate. In many cases, the progression from blurriness of central vision to virtual blindness occurs in less than two years. In the advanced stage of the disease, the exudative or wet form of AMD, new blood vessels penetrate from the choriocapillaris into the central part of the retina (macula), occluding central vision. In the United States, the prevalence of wet AMD is about 1.8 million and is expected to increase to close to 3 million by 2020. The incidence of wet AMD in the United States is about 210,000 people each year.

[0007] Recently, AMD has been treated by blocking VEGF-mediated induction of angiogenesis and blood vessels leakiness by direct injection into the eye of high-affinity antagonists that bind to VEGF, preventing interaction of VEGF with its cell-surface receptors on endothelial cells.

[0008] There is considerable evidence that dual inhibition of VEGF and PDGF-B signaling leads to more efficient blocking of angiogenesis coupled with regression of new blood vessels. For example, clinical evidence suggests that dual inhibition of VEGF and PDGF-B can achieve a more complete inhibition of ocular angiogenesis in AMD patients. An aptamer inhibitor of PDGF-B (E10030), originally discovered at NeXstar Pharmaceuticals (Green, L. S., et al. (1996) Biochemistry 35:14413; U.S. Pat. Nos. 6,207,816; 5,731,144; 5,731,424; and 6,124,449), is being developed by Ophthotech Corporation as a treatment for AMD. E10030 (Fovista®) is a DNA-based modified aptamer that binds to PDGF-AB or PDGF-BB with a K_{d} of approximately 100 pM and inhibits the functions of PDGF-B both in vitro and in vivo.

[0009] In a Phase 1 study, anti-PDGF therapy with E10030 tested in combination with Lucentis® anti-VEGF therapy resulted in vision gain of three lines in 59% of treated patients after 12 weeks of therapy. This is a considerably higher percentage of patients with improved visual acuity compared to the 34-40% observed historically with Lucentis alone. In addition, the combination treatment was accompanied with marked neovascular regression in all study participants. Enhanced efficacy with combination treatment was recently corroborated in a phase 2 study of 449 patients with wet AMD. Patients receiving the combination of Fovista (1.5 mg) and Lucentis gained a mean of 10.6 letters of vision at 24 weeks, compared to 6.5 letters for patients receiving Lucentis monotherapy (p=0.019), representing a 62% additional vidual acuity benefit.

### SUMMARY

[0010] The present disclosure provides aptamers that bind to platelet-derived growth factor B (PDGF-B, including PDGF-BB and PDGF-AB), aptamers that bind vascular endothelial growth factor (VEGF, including VEGF-121 and VEGF-165), and aptamer constructs comprising an aptamer that binds PDGF-B and an aptamer that binds VEGF. The disclosed aptamers and aptamer constructs are useful as therapeutics for preventing, treating, and/or ameliorating proliferating diseases or conditions, including but not limited to, atherosclerosis, macular degeneration, fibrosis, diabetic retinopathy, and cancer, and/or other diseases or conditions in which PDGF and/or VEGF is implicated. In various embodiments, the aptamer constructs are capable of binding to each of VEGF and PDGF-B independently and/or VEGF and PDGF-B simultaneously. Included are pharmaceutical compositions or formulations comprising a PDGF aptamer, a VEGF aptamer, or a VEGF/PDGF-B aptamer construct, or a pharmaceutically acceptable salt of any of the foregoing, and at least one pharmaceutically acceptable carrier. Such compositions can be prepared in any suitable pharmaceutically acceptable dosage form.

[0011] In another aspect, the present disclosure provides methods for preventing, treating, and/or ameliorating a disease or condition mediated by PDGF and/or VEGF. In some embodiments, a method comprises administering a PDGF aptamer, a VEGF aptamer, and/or a VEGF/PDGF-B aptamer construct, or pharmaceutical compositions comprising any of these, to a subject, such as a mammal. In some embodiments, the subject is a human. Specifically, methods for treating, preventing, and/or ameliorating fibrosis, atherosclerosis, macular degeneration, diabetic retinopathy, and/or cancer are provided. In some embodiments, a disease or condition mediated by PDGF and/or VEGF is one in which PDGF and/or VEGF activity may directly or indirectly contribute to the disease or condition. Such diseases or conditions include, but are not limited to, fibrosis, atherosclerosis, macular degeneration, diabetic retinopathy, and cancer. In some embodiments the disease or condition to be treated, prevented, and/or ameliorated is age-related macular degeneration (AMD), diabetic retinopathy, or other ocular diseases, such as glaucoma, chronic dry eye, AIDS-related vision loss, amblyopia, hemianopia, retinal vein occlusions, trachoma, keratoconus, chorioretinal inflammation, central serous retinopathy, uveitis, retinitis, hypertensive retinopathy, retinal dystrophy, etc. In some embodiments, the disease or condition to be treated, prevented, and/or ameliorated is renal fibrosis or renal cancer.

[0012] In some embodiments, aptamers and aptamer constructs disclosed herein have potential applications ranging from biomarker discovery and diagnostics (Ostroff, R. M., et al. (2010) PLoS One 5:e15003; Mehan, M., et al. (2012) PLoS One 7:e35157) to histochemistry and imaging (Gupta, S., et al. (2011) Appl. Immunohistochem. Mol. Morphol. 19:273).

[0013] In some embodiments, a therapeutic effect (e.g., treating, preventing, and/or ameliorating fibrosis, atherosclerosis, macular degeneration, or cancer, etc.) may be achieved by administering a PDGF aptamer, a VEGF aptamer, and/or a PDGF/VEGF aptamer construct such that the aptamer or aptamer construct is exposed to, and can bind to, PDGF and/or VEGF. In some embodiments, such binding occurs regardless of the method of delivery of the aptamer to the subject being treated. In some embodiments, the therapeutic effect may be achieved by administering the PDGF aptamer, VEGF aptamer, or PDGF/VEGF aptamer construct such that it is exposed to, and binds to, PDGF and/or VEGF and prevents or reduces the binding of PDGF and/or VEGF to one or more cell receptors.

[0014] In some embodiments, the binding of a PDGF aptamer to PDGF-BB or PDGF-AB interferes with the binding of PDGF-BB or PDGF-AB to the PDGF-α receptor. In some embodiments, the binding of a PDGF aptamer to PDGF-BB or PDGF-AB interferes with the binding of PDGF-BB or PDGF-AB to the PDGF-β receptor. In some embodiments, a PDGF aptamer to PDGF-BB or PDGF-AB reduces phosphorylation of a PDGF receptor (such as PDGF-α receptor and/or PDGF-β receptor).

[0015] In some embodiments, the binding of a VEGF aptamer to VEGF-121, VEGF-110, VEGF-165, VEGF-189, or another alternatively spliced or functionally-active proteolytic fragment of VEGF interferes with the binding of the growth factor to VEGFR-1 (Flt-1). In some embodiments, the binding of a VEGF aptamer to VEGF-121, VEGF-110, VEGF-165, VEGF-189, or another alternatively spliced or functionally-active proteolytic fragment of VEGF, interferes with the binding of the growth factor to VEGFR-2 (KDR). In some embodiments, a VEGF aptamer reduces phosphorylation of a VEGF receptor (such as VEGF-1 receptor and/or VEGF-1 receptor).

[0016] In some embodiments, a PDGF/VEGF aptamer construct reduces the level of phosphorylation of a PDGF receptor (such as PDGF-α receptor and/or PDGF-β receptor) and reduces the level of phosphorylation of a VEGF receptor (such as VEGFR-1 and/or VEGFR-2). In some embodiments, a PDGF aptamer, a VEGF aptamer, or a PDGF/VEGF aptamer construct reduces signaling along the signal transduction pathway of a PDGF receptor and/or a VEGF receptor.

[0017] In some embodiments, a PDGF aptamer, a VEGF aptamer, or a PDGF/VEGF aptamer construct is administered with one or more additional active agents. Such administration may be sequential or in combination.

[0018] In some embodiments, an in vitro diagnostic method comprises contacting a PDGF aptamer with a sample suspected of comprising PDGF. In some embodiments, an in vivo diagnostic method comprises administering a suitably labeled PDGF aptamer to an individual suspected of having a PDGF-mediated disease or disorder, wherein the labeled PDGF aptamer is detected for the purpose of diagnosing or evaluating the health status of the individual. The label used may be selected in accordance with the imaging modality to be used.

[0019] In some embodiments, an in vitro diagnostic method comprises contacting a VEGF aptamer with a sample suspected of comprising VEGF. In some embodiments, an in vivo diagnostic method comprises administering a suitably labeled VEGF aptamer to an individual suspected of having VEGF-mediated disease or disorder, wherein the labeled VEGF aptamer is detected for the purpose of diagnosing or evaluating the health status of the individual. The label used may be selected in accordance with the imaging modality to be used.

[0020] In some embodiments, an in vitro diagnostic method comprises contacting a PDGF/VEGF aptamer construct with a sample suspected of comprising PDGF and/or VEGF. In another aspect, the present disclosure provides an in vivo diagnostic method comprising obtaining a suitably labeled PDGF/VEGF aptamer construct, injecting the labeled PDGF/VEGF aptamer construct into an individual suspected of having a PDGF/VEGF-mediated disease or disorder, and detecting the labeled PDGF/VEGF aptamer construct for the purpose of diagnosing or evaluating the health status of the individual. The label used may be selected in accordance with the imaging modality to be used.

[0021] In some embodiments, the present invention provides aptamer constructs comprising a PDGF aptamer and a VEGF aptamer.

[0022] In some embodiments, the present disclosure provides two discrete co-crystal structures, solved at resolutions of 2.2 Å and 2.3 Å, each containing two copies of an aptamer bound to PDGF-BB.

[0023] In some embodiments, the present disclosure provides an aptamer that efficiently binds to a protein predominantly through hydrophobic interactions.

[0024] In some embodiments, the present disclosure provides an aptamer-protein complex, wherein the aptamer binds to the protein substantially through hydrophobic interactions.

[0025] In some embodiments, the present disclosure provides an aptamer capable of forming a co-crystal complex with a protein target, wherein the complex comprises fewer than 7 hydrogen bonds.

[0026] In some embodiments, the present disclosure provides an aptamer capable of forming a co-crystal complex with a protein target, wherein the complex comprises a pseudoknot domain involving 16 nucleotides or less.

[0027] In some embodiments, the present disclosure provides an aptamer capable of binding to a protein target, wherein the aptamer binds to the protein target with less than or equal to 1 polar contact per 100 Å² of interface area, wherein the polar contact comprises one or more hydrogen bonds and one or more charge-charge interactions, and wherein the interface area is a fraction of the protein surface area occupied by the aptamer.

### BRIEF DESCRIPTION OF THE DRAWINGS

[0028] FIG. 1 shows (A) determination of K_{d} values for three slow off rate modified aptamers and aptamer E10030; (B) inhibition of PDGF-BB-stimulated phosphorylation of PDGFRβ by three PDGF aptamers described herein and a scrambled control oligonucleotide; (C) the K_{d} ratios for modified aptamers versus the parent aptamer, 4149-8_{—}130, in which a particular Bn-dU nucleobase has been replaced by another modified dU nucleobase, relative to the parent aptamer (a value of 1 indicates the modified aptamer inhibits phosphorylation of PDGFRβ equally as well as the parent, while a value >1 indicates the modified aptamer has less potent inhibitory activity compared to the parent).

[0029] FIG. 2 shows (A) a table of aptamer 4149-8_{—}260 intramolecular contacts and aptamer-PDGF contacts; (B) a representation of nonpolar intramolecular and aptamer-PDGF contacts; and (C) a representation of polar intramolecular and aptamer-PDGF contacts; as described in Example 2. Hydrophobic (nonpolar) interactions include π-π interactions (both face-to-face and edge-to-face aromatic interactions) and van der Waals contact (vW). Polar interactions include hydrogen bonds (dashed lines) and charge-charge interactions (solid lines. Certain aptamer residues (e.g., dC4, dG6, dA9, dC10, dC12, dG13, dC14, dG15, dG22, dC23 and 2′-O-methyl G24) participate in canonical base pairing and base stacking, as shown in B and C, and 2′-O-methyl A11 is extruded.

[0030] FIG. 3 shows (A) the consensus sequence for a set of clones from the SELEX pool as determined by 454 pyrosequencing and nucleotide frequency at each position, and the sequences for six of the clones; and (B) K_{d} values for modified aptamers based on parent aptamer 4149-8, which were modified as shown, as described in Example 1.

[0031] FIG. 4 illustrates certain stereoviews of a PDGF-BB: 4149-8_{—}260 complex, as described in Example 2.

[0032] FIG. 5 shows (A) binding affinity of various aptamers for different PDGF dimeric isoforms, in the presence and absence of 200 nM tRNA; and (B) an alignment of the amino acid sequences for the mature forms of PDGF-A, -B, -C and -D; as described in Example 3. Amino acid residues for PDGF-A that are shown in bold are involved in propeptide binding, and amino acid residues for PDGF-B that are shown in bold are involved in PDGFRβ binding (Shim et al, (2010) Proc. Natl. Acad. Sci. USA 107(25):11307). Box shading indicates residues involved in aptamer 4149-8_{—}260 binding to PDGF-B chain 1 (dark shading), and PDGF-B chain 2 (light shading).

[0033] FIG. 6 shows (A) the K_{d} ratio for modified aptamers made by substituting each indicated position in aptamer 4149-8_{—}38 (SED ID NO: 38) with a three-carbon C-3 linker, and K_{d} values for PDGF-BB binding, PDGF-AB binding, as well as cellular IC₅₀ for five modified aptamers based on parent aptamer 4149-8; and (B) K_{d} ratios for modified aptamers based on parent aptamer 4149-8_{—}130 (SEQ ID NO: 130), in which a particular Bn-dU nucleobase has been replaced by another modified dU nucleobase, relative to the parent aptamer (numbers <1 indicate the modified aptamer has greater affinity than the parent aptamer, and numbers >1 indicate the modified aptamer has lower affinity than the parent aptamer); as described in Example 1.

[0034] FIG. 7 shows (A) a ribbon diagram of the PDGF-BB homodimer bound to aptamer 4149-8_{—}260 (SEQ ID NO: 211); and (B) a schematic representation and structural represent ation of the aptamer conformation when bound to a PDGF-B subunit; as described in Example 2. Non-canonical base pairs are coded based on the nomenclature of Leontis and Westhof (Leontis N. B. et al. (2003) Curr. Opin. Struct. Biol. 13(3):300). Dark gray=PDGF-B Chain 1; Light gray=PDGF-B Chain 2; Bn=Bn-dU, Pe=Pe-dU, Th=Th-dU.

[0035] FIGS. 8A-L illustrate certain structural features of the PDGF aptamer from the crystal structure of the PDGF-BB: 4149-8_{—}260 aptamer complex, as described in Example 2. FIG. 8A illustrates the aptamer structure, showing domains, basepairing and stacking interactions. The stems of the miniknot deviate significantly from B-form DNA due to substantial buckling and propeller angles as well as helical underwinding. Bn20 is the hinge that interfaces with the 5′ stem through stacking with U8. FIG. 8B illustrates Stem 1 (S1) end view. FIG. 8C illustrates S1 and L2 side views. The modified nucleotides form a hydrophobic cluster with Bn2, Bn7 and Bn8 from the 5′ stem interacting with Bn16, Pe17, Th18 and Bn20 from the miniknot. Bn8 makes edge-to-face π-π interactions with Bn16 and Bn20. The non-canonical dU-dU base pair utilizes H-bonding to the amide linker of Bn20. FIG. 8D illustrates the details of the non-canonical base pair between Pe-dU17 and Bn-dU20. FIG. 8E illustrates aromatic interactions stabilizing the base of miniknot S1. FIG. 8F illustrates a base triple which is formed between the C10-G15 Watson-Crick pair in the S1 and L 2 nucleotide, A21. The Leontis-Westhof classification of this base triple is cis Watson-Crick/Watson-Crick, trans Sugar edge/Hoogsteen (Leontis N. B. et al. (2003) Curr. Opin. Struct. Biol. 13:300). The base triple is not planar as there is a 34° propeller twist angle between A21 and G15 as well as considerable buckling and propeller twisting between the Watson-Crick base pair (Table 5). FIG. 8G illustrates residue mA11, the single extruded base in L1 and the backbone turn. FIG. 8H illustrates an axial view of S2. FIG. 8I illustrates an axial view of the 5′ stem motif which highlights the significant deviation from B-form DNA. The global C1′-C1′ helical parameters indicate the dU-dU pair is overtwisted) (40° resulting in a ˜124° bend in the backbone which flattens to near linear (˜172°) between Bn-dU1 and Bn-dU2. The significant radial displacement between Bn-dU7-Bn-dU8 and near zero displacement between Bn-dU2-dA3 results in greater stacking overlap between bases 2-4 and 6-7. FIG. 8J which illustrates the non-canonical base pair between Bn-dU2 and Bn-dU8. FIG. 8K illustrates the interdomain junction formed by modified nucleotides. FIG. 8L illustrates Bn8 making edge-to-face π-π interactions with Bn16 and Bn20 that define the topology of the interdomain junction. The deleterious impact of substituting Bn-dU at position 8 of aptamer 4149-8_{—}260 (SEQ ID NO: 211) with an iB-dU (SEQ ID NO: 255) is evident in the space-filling images shown in FIG. 8M and FIG. 8N. Bn8 (8M) is capable of making energetically favorable π-π interactions with neighboring aromatic groups and allows the SOMAmer to pack more tightly. In contrast, iB8 (8N) is not aromatic and thus lacks the ability for π-stacking interactions with neighboring aromatic groups. Additionally, the iB group is not as large and leaves a hole in the middle of the hydrophobic cluster.

[0036] FIG. 9 illustrates certain protein-aptamer interactions, as described in Example 2. In FIG. 9A, Bn-dU1 occupies a pocket under a salt bridge at the homodimer interface. The U1 base makes hydrogen bonds to the protein backbone at Val39 while the benzyl ring is sandwiched between the aliphatic side chain of Arg 56 and the disulfide bond of Cys43-Cys52. In FIG. 9B, Bn2 has an edgewise interaction with Trp40 and is nestled between the methylene side chains of Asn55 and Leu38. FIG. 9C illustrates that the aromatic ring of Bn7 tucks up against the aliphatic portions of Asn54 and Asn55 side chains. FIG. 9D illustrates that the Leu38 and Ile75 side chains present a hydrophobic surface for the benzyl ring of Bn-dU8 to contact the protein. FIG. 9E illustrates that Bn16 has edge-to-face π-stacking with Trp40 and van der Waals contact with the aliphatic region of Arg73. FIG. 9F illustrates that Pe17 is surrounded by the hydrophobic side chains of Leu38, Trp40, Arg73 and Ile75. Arg73 makes a hydrogen bond to the amide linker of Pe-dU17 and a charge-charge interaction with the aptamer backbone. FIG. 9G illustrates Th18 encircled by the hydrophobic side chains of Arg73, Ile75 and Phe84. FIG. 9H illustrates that stacking interactions between the protein and the aptamer are present between Pro82 and Bn20 and U8, and Phe84 makes edge-to-face contact with U20. Bn20 makes additional hydrophobic contact to Ile77 and Lys80.

[0037] FIG. 10 shows the six co-crystal structures of traditional aptamers (PDB IDs: vWF, 3HXO; Thrombin, 3QLP; GlnRs tRNA, 1EXD; Human IgG, 3AGV; MS2 coat protein, 6MSF; NF-kB, 1OOA) that were analyzed for the number of polar contacts (hydrogen bonds plus charge-charge interactions), and the contact surface area. The results are plotted versus the reported binding affinities for these six aptamer-target complexes (dark gray bars) and for three SOMAmers (light gray bars) including the PDGF-SL5 (4149-8_{—}260) complex and two unpublished SOMAmer-target structures. The relationship between the number of polar contacts and the contact surface area for the six traditional aptamers was analyzed by linear regression, and the 99% confidence interval is indicated by the gray shading on the floor of the figure. FIG. 10B illustrates shape complementarity of the PDGF-SOMAmer complex as exhibited by Pe-dU17 and Th-dU18. Left, PDGF chain 1 is shown as a dark gray surface, Pe-dU17 and Th-dU18 are shown as space-filling representations. Right, same view as left panel, except Pe-dU17 is shown as stick representation. FIG. 10C illustrates detail of Bn-dU1 interaction with PDGF, with PDGF chain 1 shown as a dark gray surface, PDGF chain 2 shown as a light gray surface, and Bn-dU1 shown as a space-filling representation.

[0038] FIG. 11 shows a comparison of SL5 and PDGFRβ binding to PDGF-BB. (A) Receptor co-crystal showing PDGF homodimer (chain 1, medium gray; chain 2, light gray) and receptor extracellular domain colored dark gray (from Shim, A. H., et al. (2010) Proc. Natl. Acad. Sci. USA 107(25):11307). (B) Complex of PDGF homodimer (chain 1, medium gray; chain 2, light gray) and SL5 (dark gray). (C) Amino acid sequence of the PDGF-B mature form. Box shading indicates contact residues to 4149-8_{—}260, PDGFRβ or both. PDGF residues that make a 4 Å contact with 4149-8_{—}260, but do not contact PDGFRβ are boxed with no shading. PDGF residues that make 4 Å contact with PDGFRβ, but do not contact 4149-8_{—}260 are boxed with dark gray shading. PDGF residues that make 4 Å contact with both 4149-8_{—}260 and PDGFRβ are boxed with medium gray shading.

[0039] FIG. 12 illustrates certain exemplary C-5 pyrimidine modifications that may be incorporated into aptamers, such as slow off-rate aptamers.

[0040] FIG. 13 shows a representative plot of the inhibition of PDGF-BB-induced PDGF Rβ phosphorylation in Hs27 fibroblasts with SOMAmers 4149-8_{—}379 (labeled as OH-4149-8_{—}379) or 5′ amino-linker modified SOMAmer 4149-8_{—}379 (labeled as N-4149-8_{—}379), as described in Example 4.

[0041] FIG. 14 shows the consensus sequence for a set of PDGF-binding clones from the SELEX pool as determined by 454 pyrosequencing and nucleotide frequency at each position, as described in Example 5.

[0042] FIG. 15 shows K_{d} ratios for modified aptamers based on parent aptamer 4867-31_{—}143, in which a particular Nap-dU nucleobase has been replaced by another modified dU nucleobase, relative to the parent aptamer (numbers <1 indicate the modified aptamer has greater affinity than the parent aptamer, and numbers >1 indicate the modified aptamer has lower affinity than the parent aptamer); as described in Example 7.

[0043] FIG. 16 shows the consensus sequence for a set of VEGF-binding clones from the SELEX pool as determined by 454 pyrosequencing and nucleotide frequency at each position, as described in Example 7.

[0044] FIG. 17 shows percent VEGFR2 phosphorylation in human umbilical vein endothelial cells (HUVECs) stimulated with VEGF-121 or VEGF-165 and VEGF aptamers 4867-31_{—}43 and 4867-31_{—}192, as described in Example 9.

[0045] FIG. 18 shows (A) inhibition of PDGF-induced PDGF Rβ phosphorylation in Hs27 fibroblasts with PDGF aptamer 4149-8_{—}379 (open circles) and PDGF/VEGF aptamer construct 4149-8_{—}401 (closed circles); and (B) inhibition of VEGF-induced VEGF R2 phosphorylation in HUVECs with VEGF aptamer 4867-31_{—}192 (open circles) and PDGF/VEGF aptamer construct 4149-8_{—}401 (closed circles); as described in Example 11.

[0046] FIG. 19 shows simultaneous binding of PDGF and VEGF by PDGF/VEGF aptamer construct SL1012 (20 kDa PEG-N-4149-8_{—}401) on (A) microtiter plates coated with the VEGF with addition of biotinylated PDGF, and (B) microtiter plates coated with PDGF with the addition of biotinylated VEGF, as described in Example 12.

[0047] FIG. 20 shows simultaneous binding of PDGF and VEGF by PDGF/VEGF aptamer constructs (A) SL1012 (20 kDa PEG-N-4149-8_{—}401) and (B) SL1013 (40 kDA PEG-N-4149-8-401), on microtiter plates that were coated with PDGF with the addition of biotinylated VEGF, as described in Example 12.

[0048] FIG. 21 shows the simultaneous binding of PDGF and VEGF by various PDGF/VEGF aptamer constructs on (A) microtiter plates coated with VEGF with the addition of biotinylated PDGF, and (B) microtiter plates coated with PDGF with the addition of biotinylated VEGF, as described in Example 12.

[0049] FIG. 22 shows (A) a plot of a number of polar contacts (defined as the sum of hydrogen bonds and charge-charge interactions) versus interface area for traditional aptamers (diamonds) and SOMAmers (circles) (the linear regression fit has an R²=0.91 with a slope of 0.016; dashed lines represent the 99% confidence intervals of this trend, with the SOMAmers falling outside those boundaries), (B) a plot of free energy binding versus polar contacts for traditional aptamers (diamonds) and SOMAmers (circles) (the linear regression fit has an R²=0.64 with a slope of 0.073), and (C) a table showing various thermodynamic properties and contact characteristics of six previous aptamer-protein crystal structures and three SOMAmer-protein crystal structures, including PDGF-BB: 4149-8_{—}260, as described in Example 2. (C) Interaction features for aptamers and SOMAmers bound to protein targets (figure references: (a) Convery et al. (1998) Nat. Struct. Biol. 5(2):133; (b) Nomura et al. (2010) Nucleic Acids Res. 38(21): 7822; (c) Pagano et al. (2008) Biophys. J. 94(2):562; (d) Huang et al. (2003) Proc. Natl. Acad. Sci. USA 100(16):9268; (e) Huang et al. (2009) Structure 17(11):1476; (f) Bullock et al. (2000) Nat. Struct. Biol. 7(6):497. Free energy calculations were determined from the measured binding affinities for SOMAmers, or the published K_{d} values using the following temperatures: MS2, thrombin, NFkB, vWF, and GlnRs, room temperature (296 K); IgG, 298 K; SOMAmers, 310 K. SOMAmers show a trend toward higher binding affinities; average free energy of binding, or -ΔG value, is 11.4±1.3 kcal/mol for the six aptamers and 14.3 kcal/mol±0.8 kcal/mol for the three SOMAmers. Protein contact atoms within 4 Å of each ligand were determined in PyMOL. Interface area calculations were made with PISA (aptamers) (Krissinel et al. (2007) J. Mol. Biol. 372(3):774) or PyMOL (SOMAmers) (DeLano (2002) The Pymol Molecular Graphics System, Delano Scientific, San Carlos, Calif.). Within this relatively small data set of crystallographically evaluated interactions, aptamers engage their targets with an average ligand efficiency of 0.21±0.14 kcal/mol per nonhydrogen contact atom, compared to 0.16±0.04 kcal/mol per non-hydrogen contact atom for SOMAmers. Free energies of binding per interface area are also similar, with an average value of 0.017±0.009 kcal·mol⁻¹·Å⁻² for aptamers and 0.012±0.001 kcal·mol⁻¹·Å⁻² for SOMAmers. The value of free energy of binding per polar contact, calculated from values in the table, is about twice as large for SOMAmers (average of 1.75±0.36 kcal/mol per polar contact) as for aptamers (0.89±0.56 kcal/mol per polar contact).

### DETAILED DESCRIPTION

[0050] Reference will now be made in detail to representative embodiments of the invention. While the invention will be described in conjunction with the enumerated embodiments, it will be understood that the invention is not intended to be limited to those embodiments. On the contrary, the invention is intended to cover all alternatives, modifications, and equivalents that may be included within the scope of the present invention as defined by the claims.

[0051] One skilled in the art will recognize many methods and materials similar or equivalent to those described herein, which could be used in and are within the scope of the practice of the present invention. The present invention is in no way limited to the methods and materials described.

[0052] Unless defined otherwise, technical and scientific terms used herein have the same meaning as commonly understood by one of ordinary skill in the art(s) to which this invention belongs. Although any methods, devices, and materials similar or equivalent to those described herein can be used in the practice or testing of the invention, the preferred methods, devices and materials are now described.

[0053] All publications, published patent documents, and patent applications cited in this disclosure are indicative of the level of skill in the art(s) to which the disclosure pertains. All publications, published patent documents, and patent applications cited herein are hereby incorporated by reference to the same extent as though each individual publication, published patent document, or patent application was specifically and individually indicated as being incorporated by reference.

[0054] As used in this disclosure, including the appended claims, the singular forms “a,” “an,” and “the” include plural references, unless the content clearly dictates otherwise, and are used interchangeably with “at least one” and “one or more.” Thus, reference to “an aptamer” includes mixtures of aptamers, and the like.

[0055] As used herein, the term “about” represents an insignificant modification or variation of the numerical value such that the basic function of the item to which the numerical value relates is unchanged.

[0056] As used herein, the terms “comprises,” “comprising,” “includes,” “including,” “contains,” “containing,” and any variations thereof, are intended to cover a non-exclusive inclusion, such that a process, method, product-by-process, or composition of matter that comprises, includes, or contains an element or list of elements does not include only those elements but may include other elements not expressly listed or inherent to such process, method, product-by-process, or composition of matter.

[0057] As used herein, the term “nucleotide” refers to a ribonucleotide or a deoxyribonucleotide, or a modified form thereof, as well as an analog thereof. Nucleotides include species that include purines (e.g., adenine, hypoxanthine, guanine, and their derivatives and analogs) as well as pyrimidines (e.g., cytosine, uracil, thymine, and their derivatives and analogs).

[0058] As used herein, “nucleic acid,” “oligonucleotide,” and “polynucleotide” are used interchangeably to refer to a polymer of nucleotides and include DNA, RNA, DNA/RNA hybrids and modifications of these kinds of nucleic acids, oligonucleotides and polynucleotides, wherein the attachment of various entities or moieties to the nucleotide units at any position are included. The terms “polynucleotide,” “oligonucleotide,” and “nucleic acid” include double- or single-stranded molecules as well as triple-helical molecules. Nucleic acid, oligonucleotide, and polynucleotide are broader terms than the term aptamer and, thus, the terms nucleic acid, oligonucleotide, and polynucleotide include polymers of nucleotides that are aptamers but the terms nucleic acid, oligonucleotide, and polynucleotide are not limited to aptamers.

[0059] As used herein, the terms “modify”, “modified”, “modification”, and any variations thereof, when used in reference to an oligonucleotide, means that at least one of the four constituent nucleotide bases (i.e., A, G, T/U, and C) of the oligonucleotide is an analog or ester of a naturally occurring nucleotide. In some embodiments, the modified nucleotide confers nuclease resistance to the oligonucleotide. In some embodiments, the modified nucleotides lead to predominantly hydrophobic interactions of aptamers with protein targets resulting in high binding efficiency and stable co-crystal complexes. A pyrimidine with a substitution at the C-5 position is an example of a modified nucleotide. Modifications can include backbone modifications, methylations, unusual base-pairing combinations such as the isobases isocytidine and isoguanidine, and the like. Modifications can also include 3′ and 5′ modifications, such as capping. Other modifications can include substitution of one or more of the naturally occurring nucleotides with an analog, internucleotide modifications such as, for example, those with uncharged linkages (e.g., methyl phosphonates, phosphotriesters, phosphoamidates, carbamates, etc.) and those with charged linkages (e.g., phosphorothioates, phosphorodithioates, etc.), those with intercalators (e.g., acridine, psoralen, etc.), those containing chelators (e.g., metals, radioactive metals, boron, oxidative metals, etc.), those containing alkylators, and those with modified linkages (e.g., alpha anomeric nucleic acids, etc.). Further, any of the hydroxyl groups ordinarily present on the sugar of a nucleotide may be replaced by a phosphonate group or a phosphate group; protected by standard protecting groups; or activated to prepare additional linkages to additional nucleotides or to a solid support. The 5′ and 3′ terminal OH groups can be phosphorylated or substituted with amines, organic capping group moieties of from about 1 to about 20 carbon atoms, polyethylene glycol (PEG) polymers in some embodiments ranging from about 10 to about 80 kDa, PEG polymers in some embodiments ranging from about 20 to about 60 kDa, or other hydrophilic or hydrophobic biological or synthetic polymers. In some embodiments, modifications are of the C-5 position of pyrimidines. These modifications can be produced through an amide linkage directly at the C-5 position or by other types of linkages.

[0060] Polynucleotides can also contain analogous forms of ribose or deoxyribose sugars that are generally known in the art, including 2′-O-methyl-, 2′-O-allyl, 2′-fluoro- or 2′-azido-ribose, carbocyclic sugar analogs, α-anomeric sugars, epimeric sugars such as arabinose, xyloses or lyxoses, pyranose sugars, furanose sugars, sedoheptuloses, acyclic analogs and abasic nucleoside analogs such as methyl riboside. As noted above, one or more phosphodiester linkages may be replaced by alternative linking groups. These alternative linking groups include embodiments wherein phosphate is replaced by P(O)S (“thioate”), P(S)S (“dithioate”), (O)NR₂ (“amidate”), P(O)R, P(O)OR′, CO or CH₂ (“formacetal”), in which each R or R′ is independently H or substituted or unsubstituted alkyl (1-20 C) optionally containing an ether (—O—) linkage, aryl, alkenyl, cycloalky, cycloalkenyl or araldyl. Not all linkages in a polynucleotide need be identical. Substitution of analogous forms of sugars, purines, and pyrimidines can be advantageous in designing a final product, as can alternative backbone structures like a polyamide backbone, for example.

[0061] As used herein, the term “nuclease” refers to an enzyme capable of cleaving the phosphodiester bond between nucleotide subunits of an oligonucleotide. As used herein, the term “endonuclease” refers to an enzyme that cleaves phosphodiester bond(s) at a site internal to the oligonucleotide. As used herein, the term “exonuclease” refers to an enzyme which cleaves phosphodiester bond(s) linking the end nucleotides of an oligonucleotide. Biological fluids typically contain a mixture of both endonucleases and exonucleases.

[0062] As used herein, the terms “nuclease resistant” and “nuclease resistance” refers to the reduced ability of an oligonucleotide to serve as a substrate for an endo- or exonuclease, such that, when contacted with such an enzyme, the oligonucleotide is either not degraded or is degraded more slowly than an oligonucleotide composed of unmodified nucleotides.

[0063] As used herein, the term “C-5 modified pyrimidine” refers to a pyrimidine with a modification at the C-5 position including, but not limited to, those moieties illustrated in FIG. 12. Examples of a C-5 modified pyrimidine include those described in U.S. Pat. Nos. 5,719,273 and 5,945,527. Examples of a C-5 modification include substitution of deoxyuridine at the C-5 position with a substituent independently selected from: benzylcarboxyamide (alternatively benzylaminocarbonyl) (Bn), naphthylmethylcarboxyamide (alternatively naphthylmethylaminocarbonyl) (Nap), tryptaminocarboxyamide (alternatively tryptaminocarbonyl) (Trp), phenethylcarboxyamide (alternatively phenethylamino carbonyl) (Pe), thiophenylmethylcarboxyamide (alternatively thiophenylmethylaminocarbonyl) (Th) and isobutylcarboxyamide (alternatively isobutylaminocarbonyl) (iBu) as illustrated immediately below.

[chemical structure]

[0064] Chemical modifications of a C-5 modified pyrimidine can also be combined with, singly or in any combination, 2′-position sugar modifications, modifications at exocyclic amines, and substitution of 4-thiouridine and the like.

[0065] Representative C-5 modified pyrimidines include: 5-(N-benzylcarboxyamide)-2′-deoxyuridine (BndU), 5-(N-benzylcarboxyamide)-2′-O-methyluridine, 5-(N-benzylcarboxyamide)-2′-fluorouridine, 5-(N-isobutylcarboxyamide)-2′-deoxyuridine (iBudU), 5-(N-isobutylcarboxyamide)-2′-O-methyluridine, 5-(N-phenethylcarboxyamide)-2′-deoxyuridine (PedU), 5-(N-thiophenylmethylcarboxyamide)-2′-deoxyuridine (ThdU), 5-(N-isobutylcarboxyamide)-2′-fluorouridine, 5-(N-tryptaminocarboxyamide)-2′-deoxyuridine (TrpdU), 5-(N-tryptaminocarboxyamide)-2′-O-methyluridine, 5-(N-tryptaminocarboxyamide)-2′-fluorouridine, 5-(N-[1-(3-trimethylamonium) propyl]carboxyamide)-2′-deoxyuridine chloride, 5-(N-naphthylmethylcarboxyamide)-2′-deoxyuridine (NapdU), 5-(N-naphthylmethylcarboxyamide)-2′-O-methyluridine, 5-(N-naphthylmethylcarboxyamide)-2′-fluorouridine or 5-(N-[1-(2,3-dihydroxypropyl)]carboxyamide)-2′-deoxyuridine).

[0066] Nucleotides can be modified either before or after synthesis of an oligonucleotide. A sequence of nucleotides in an oligonucleotide may be interrupted by one or more non-nucleotide components. A modified oligonucleotide may be further modified after polymerization, such as, for example, by conjugation with any suitable labeling component.

[0067] As used herein, the term “at least one pyrimidine,” when referring to modifications of a nucleic acid, refers to one, several, or all pyrimidines in the nucleic acid, indicating that any or all occurrences of any or all of C, T, or U in a nucleic acid may be modified or not.

[0068] As used herein, A, C, G, U and T denote dA, dC, dG, dU and dT respectively, unless otherwise specified.

[0069] As used herein, “nucleic acid ligand,” “aptamer,” and “clone” are used interchangeably to refer to a non-naturally occurring nucleic acid that has a desirable action on a target molecule. A desirable action includes, but is not limited to, binding of the target, catalytically changing the target, reacting with the target in a way that modifies or alters the target or the functional activity of the target, covalently attaching to the target (as in a suicide inhibitor), and facilitating the reaction between the target and another molecule. In some embodiments, the action is specific binding affinity for a target molecule, such target molecule being a three dimensional chemical structure other than a polynucleotide that binds to the nucleic acid ligand through a mechanism which is independent of Watson/Crick base pairing or triple helix formation, wherein the aptamer is not a nucleic acid having the known physiological function of being bound by the target molecule. Aptamers to a given target include nucleic acids that are identified from a candidate mixture of nucleic acids, where the aptamer is a ligand of the target, by a method comprising: (a) contacting the candidate mixture with the target, wherein nucleic acids having an increased affinity to the target relative to other nucleic acids in the candidate mixture can be partitioned from the remainder of the candidate mixture; (b) partitioning the increased affinity nucleic acids from the remainder of the candidate mixture; and (c) amplifying the increased affinity nucleic acids to yield a ligand-enriched mixture of nucleic acids, whereby aptamers of the target molecule are identified. It is recognized that affinity interactions are a matter of degree; however, in this context, the “specific binding affinity” of an aptamer for its target means that the aptamer binds to its target generally with a much higher degree of affinity than it binds to other, non-target, components in a mixture or sample. An “aptamer” or “nucleic acid ligand” is a set of copies of one type or species of nucleic acid molecule that has a particular nucleotide sequence. An aptamer can include any suitable number of nucleotides. “Aptamers” refer to more than one such set of molecules. Different aptamers can have either the same or different numbers of nucleotides. Aptamers may be DNA or RNA and may be single stranded, double stranded, or contain double stranded or triple stranded regions.

[0070] As used herein, a “SOMAmer” or Slow Off-Rate Modified Aptamer refers to an aptamer (including an aptamers comprising at least one nucleotide with a hydrophobic modification) with an off-rate (t_{1/2}) of ≧30 minutes, ≧60 minutes, ≧90 minutes, ≧120 minutes, ≧150 minutes, ≧180 minutes, ≧210 minutes, or ≧240 minutes. In some embodiments, SOMAmers are generated using the improved SELEX methods described in U.S. Pat. No. 7,947,447, entitled “Method for Generating Aptamers with Improved Off-Rates”.

[0071] As used herein, “protein” is used synonymously with “peptide,” “polypeptide,” or “peptide fragment.” A “purified” polypeptide, protein, peptide, or peptide fragment is substantially free of cellular material or other contaminating proteins from the cell, tissue, or cell-free source from which the amino acid sequence is obtained, or substantially free from chemical precursors or other chemicals when chemically synthesized.

[0072] As used herein, “co-crystal structure” or “co-crystal complex” is a crystal structure comprising two or more interacting molecules.

[0073] As used herein, “cardiovascular condition or disease” means a condition or disease related to heart and its vascular system. Some examples of such conditions or diseases are aneurysm, angina, arrhythmia, atherosclerosis, atrial fibrillation, congestive heart failure, cardiomyopathy, coronary heart disease, restenosis, ischemia, left ventricular hypertrophy, peripheral vascular disease, myocardial infarction, hypertension, valvular heart disease and restrictive heart disease.

[0074] As used herein, “fibrosis” means a disease or condition caused by the formation of an excessive and abnormal amount of fibrous connective tissue in an organ resulting in thickening and scarring of connective tissue, leading to malfunction of the organ. Examples of such diseases and conditions are pulmonary fibrosis, renal fibrosis, liver fibrosis and cystic fibrosis.

[0075] As used herein, “AMD” or “age related macular degeneration” or “macular degeneration” means a condition of the eye that is caused by damage to the retina and results in a loss of vision in the center of the visual field, called the macula. AMD occurs in “wet” and “dry” forms. In “wet” AMD, blood vessels grow from the choroid behind the retina. In “dry” AMD, cellular debris (drusen) accumulates between the retina and choroid. In either form, the retina can become detached.

[0076] As used herein, “ophthalmic disease” or “ophthalmic condition” or “ocular disease” or “ocular condition” refers to any disease or condition that affects or involves occular neovascularization disorders, such as macular degeneration (“wet” and “dry”), retinopathy of prematurity, diabetic retinopathy, neovascular glaucoma, corneal neovascularization, proliferative diabetic retinopathy (the most severe stage of diabetic retinopathy), uveitis (an inflammatory condition of the eye that often leads to macular edema), cystoid macular edema following cataract surgery, myopic degeneration (a condition in which a patient with a high degree of nearsightedness develops choroidal neovascularization), inflammatory macular degeneration (a condition in which a patient with inflammation in the macular area due to infections or other causes, develops choroidal neovascularization), and iris neovascularization (a serious complication of diabetic retinopathy or retinal vein occlusion involving new blood vessel growth on the surface of the iris).

[0077] As used herein, “renal disease” or “renal condition” refers to any disease or condition that affects or involves proliferative kidney disorders such as glomerulonephritis, masangial proliferative renal diseases, polycystic kidney disease, kidney cancers, acute kidney failure, nephropathy, amyloidosis, edema, fibrosis, glomerular diseases, renal infarction and nephritis.

[0078] As used herein “cancer” means a disease or condition involving unregulated and abnormal cell growth. Some examples of common cancers are bladder cancer, lung cancer, breast cancer, melanoma, colon and rectal cancer, lymphoma, endometrial cancer, pancreatic cancer, liver cancer, renal cancer, prostate cancer, leukemia and thyroid cancer.

[0079] As used herein, “modulate” means to alter, either by increasing or decreasing, the level of a peptide or polypeptide, or to alter, either by increasing or decreasing, the stability or activity of a peptide or a polypeptide. The term “inhibit” means to decrease the level of a peptide or a polypeptide or to decrease the stability or activity of a peptide or a polypeptide. As described herein, the protein which is modulated or inhibited is PDGF.

[0080] As used herein, the term “bioactivity” indicates an effect on one or more cellular or extracellular process (e.g., via binding, signaling, etc.) which can impact physiological or pathophysiological processes.

[0081] As used herein, the terms “platelet-derived growth factor” and “PDGF” refer to PDGF A, B, C, and D isoforms and their homo or heterodimers AA, BB, AB, CC and DD. In some instances, context will determine which isoform and/or heterodimer of PDGF is meant. For example, in some embodiments, the PDGF aptamers described herein bind to the PDGF-B isoform and homo- and heterodimers comprising that isoform, although the aptamers may be described as binding to PDGF. Specifically included in the definition are naturally-occurring human PDGF AA, AB, and BB isoforms and variants. As used herein, PDGF includes all mammalian species of PDGF, including human, canine, feline, murine, primate, equine, and bovine. A nonlimiting exemplary human PDGF-B isoform precursor has the sequence shown in Swiss-Prot Accession No. P01127.1. Nonlimiting exemplary human PDGF-B isoform mature proteins may have the sequence of amino acids 82 to 241 or 82 to 190 of Swiss-Prot Accession No. P01127.1 (referred to herein as amino acids 1 to 160 or 1 to 109 of PDGF-B).

[0082] As used herein, “PDGF receptor” refers to a receptor that is bound by and activated by PDGF, such as PDGF receptor α and PDGF receptor β. PDGF receptors include the receptors of any mammalian species, including, but not limited to, human, canine, feline, murine, equine, primate, and bovine. A nonlimiting exemplary human PDGFRβ precursor has the sequence shown in Swiss-Prot Accession No. P09619.1. A nonlimiting exemplary human PDGFRβ mature protein has the sequence of amino acids 33 to 1106 of Swiss-Prot Accession No. P09619.1. A nonlimiting exemplary human PDGFRα precursor has the sequence shown in Swiss-Prot Accession No. P16234.1. A nonlimiting exemplary human PDGFRα mature protein has the sequence of amino acids 24 to 1089 of Swiss-Prot Accession No. P16234.1.

[0083] A “PDGF aptamer” is an aptamer that is capable of binding to and modifying the activity of PDGF. In some embodiments, a PDGF aptamer inhibits the activity of PDGF in vitro. In some embodiments, a PDGF aptamer inhibits the activity of PDGF in vivo. A nonlimiting exemplary activity of PDGF is PDGF-mediated phosphorylation of the PDGF receptor, such as PDGF receptor α (PDGF Rα) or PDGF receptor β (PDGF Rβ).

[0084] In some embodiments, the “VEGF aptamer” as defined herein is a monomer, dimer or a multimer construct, optionally connected by a linker.

[0085] As used herein, the terms “vascular endothelial growth factor”, and “VEGF” refer to naturally-occurring VEGF, including isoforms and variants, such as VEGF-121, VEGF-145, VEGF-165, VEGF-183, VEGF-189, and VEGF-206. As used herein, VEGF includes all mammalian species of VEGF, including human, canine, feline, murine, primate, equine, and bovine. A nonlimiting exemplary human VEGF percursor has the sequence shown in Swiss-Prot Accession No. P15692.2. VEGF-121 is described, e.g., in Tee et al. (2001) Biochem. J. 359:219; Bornes et al. (2004) J. Biol. Chem. 279:18717.

[0086] As used herein, “VEGF receptor” refers to a receptor that is bound by and activated by VEGF, such as VEGFR-1 and VEGFR-2. VEGF receptors include the receptors of any mammalian species, including, but not limited to, human, canine, feline, murine, equine, primate, and bovine. A nonlimiting exemplary human VEGFR-1 precursor has the sequence shown in Swiss-Prot Accession No. P17948.2. A nonlimiting exemplary human VEGFR-1 mature protein has the sequence of amino acids 27 to 1338 of Swiss-Prot Accession No. P17948.2. A nonlimiting exemplary human VEGFR-2 precursor has the sequence shown in Swiss-Prot Accession No. P35968.2. A nonlimiting exemplary human VEGFR-2 mature protein has the sequence of amino acids 20 to 1356 of Swiss-Prot Accession No. P35968.2.

[0087] A “VEGF aptamer” is an aptamer that is capable of binding to and modifying the activity of VEGF. In some embodiments, a VEGF aptamer inhibits the activity of VEGF in vitro. In some embodiments, a VEGF aptamer inhibits the activity of VEGF in vivo. Nonlimiting exemplary activities of VEGF include VEGF-mediated phosphorylation of the VEGF receptor, such as VEGFR-1 or VEGFR-2. In some embodiments, a VEGF aptamer is provided that competes for binding to VEGF-121 with aptamer 4867-31_{—}183.

[0088] In some embodiments, the “VEGF aptamer” as defined herein is a monomer, dimer or a multimer construct, optionally connected by a linker.

[0089] The terms “PDGF/VEGF aptamer construct” and “VEGF/PDGF aptamer construct” are used interchangeably to refer to a construct comprising a PDGF aptamer and a VEGF aptamer. The order of the words “PDGF” and “VEGF” in “PDGF/VEGF aptamer construct” and “VEGF/PDGF aptamer construct” is not indicative of how the aptamers are linked, e.g., the order does not indicate which aptamer is located at the 5′-most position of an aptamer construct and which aptamer is located at the 3′-most position in the aptamer construct. In some embodiments, a PDGF/VEGF aptamer construct is capable of binding PDGF and VEGF simultaneously. In some embodiments, a PDGF/VEGF aptamer construct is capable of binding each of PDGF and VEGF separately. In a PDGF/VEGF aptamer construct, the PDGF aptamer and the VEGF aptamer may be linked covalently or non-covalently, e.g., through a binding pair such as streptavidin and biotin. A PDGF/VEGF aptamer construct may comprise a linker between the PDGF aptamer and the VEGF aptamer.

[0090] As used herein, “disease or condition mediated by PDGF” refers to diseases or conditions in which PDGF activity may directly or indirectly lead to the disease or condition. Nonlimiting exemplary diseases or conditions mediated by PDGF include cardiovascular diseases such as atherosclerosis, restenosis, cardiac hypertrophy related conditions, and vascular disorders; ophthalmic diseases such as macular degeneration; fibrosis; and cancers.

[0091] As used herein, “disease or condition mediated by VEGF” refers to diseases or conditions in which VEGF activity may directly or indirectly lead to the disease or condition. Nonlimiting exemplary diseases or conditions mediated by VEGF include cardiovascular diseases, autoimmune diseases, inflammatory rheumatic diseases, ophthalmic diseases, and cancers at various stages in the disease process. Nonlimiting examples of cardiovascular diseases are atherosclerosis, restenosis, cardiac hypertrophy related conditions, and vascular disorders. Non-limiting examples of ophthalmic diseases are retinitis, macular degeneration, choroiditis, retinopathy, edema, glaucoma, and cataract.

[0092] As used herein, the term “pharmaceutically acceptable” means approved by a regulatory agency of a federal or a state government or listed in the U.S. Pharmacopoeia or other generally recognized pharmacopoeia for use in animals and, more particularly, in humans. The term “carrier” refers to a diluent, adjuvant, excipient, or vehicle with which the therapeutic is administered and includes, but is not limited to, such sterile liquids as water and oils.

[0093] As used herein, the term “pharmaceutically acceptable salt” or “salt” of a PDGF aptamer, VEGF aptamer or a PDGF/VEGF aptamer construct is a product of the disclosed compound that contains an ionic bond and is typically produced by reacting the disclosed compound with either an acid or a base, suitable for administering to an individual. A pharmaceutically acceptable salt can include, but is not limited to, acid addition salts including hydrochlorides, hydrobromides, phosphates, sulphates, hydrogen sulphates, alkylsulphonates, arylsulphonates, arylalkylsulfonates, acetates, benzoates, citrates, maleates, fumarates, succinates, lactates, and tartrates; alkali metal cations such as Li, Na, K, alkali earth metal salts such as Mg or Ca, or organic amine salts.

[0094] As used herein, the term “pharmaceutical composition” is a formulation comprising a PDGF aptamer, a VEGF aptamer, or a PDGF/VEGF aptamer construct in a form suitable for administration to an individual. A pharmaceutical composition is typically formulated to be compatible with its intended route of administration. Examples of routes of administration include, but are not limited to, oral and parenteral, e.g., intravenous, intradermal, subcutaneous, inhalation, topical, transdermal, transmucosal, and rectal administration.

[0095] As used herein, the term “therapeutically effective amount” generally means the amount necessary to ameliorate at least one symptom of a disorder or condition to be prevented, reduced, or treated as described herein. The phrase “therapeutically effective amount” as it relates to the PDGF aptamers, VEGF aptamers, or PDGF/VEGF aptamer constructs of the present disclosure means the aptamer dosage that provides the specific pharmacological response for which the aptamer is administered in a significant number of individuals in need of such treatment. It is emphasized that a therapeutically effective amount of an aptamer that is administered to a particular individual in a particular instance will not always be effective in treating the conditions/diseases described herein, even though such dosage is deemed to be a therapeutically effective amount by those of skill in the art.

[0096] The terms “SELEX” and “SELEX process” are used interchangeably herein to refer generally to a combination of (1) the selection of nucleic acids that interact with a target molecule in a desirable manner, for example by binding with high affinity to a protein, with (2) the amplification of those selected nucleic acids. The SELEX process can be used to identify aptamers with high affinity to a specific target molecule.

[0097] SELEX generally includes preparing a candidate mixture of nucleic acids, binding of the candidate mixture to the desired target molecule to form an affinity complex, separating the affinity complexes from the unbound candidate nucleic acids, separating and isolating the nucleic acid from the affinity complex, purifying the nucleic acid, and identifying a specific aptamer sequence. The process may include multiple rounds to further refine the affinity of the selected aptamer. The process can include amplification steps at one or more points in the process. See, e.g., U.S. Pat. No. 5,475,096, entitled “Nucleic Acid Ligands.” The SELEX process can be used to generate an aptamer that covalently binds its target as well as an aptamer that non-covalently binds its target. See, e.g., U.S. Pat. No. 5,705,337 entitled “Systematic Evolution of Nucleic Acid Ligands by Exponential Enrichment: Chemi-SELEX.”

[0098] The SELEX process can be used to identify high-affinity aptamers containing modified nucleotides that confer improved characteristics on the aptamer, such as, for example, improved in vivo stability or improved delivery characteristics. Examples of such modifications include chemical substitutions at the ribose and/or phosphate and/or base positions. SELEX process-identified aptamers containing modified nucleotides are described in U.S. Pat. No. 5,660,985, entitled “High Affinity Nucleic Acid Ligands Containing Modified Nucleotides,” which describes oligonucleotides containing nucleotide derivatives chemically modified at the C5 and/or 2′-positions of pyrimidines. U.S. Pat. No. 5,580,737, see supra, describes highly specific aptamers containing one or more nucleotides modified with 2′-amino (2′-NH₂), 2′-fluoro (2′-F), and/or 2′-O-methyl (2′-OMe). See also, U.S. Patent Publication No. 20090098549, entitled “SELEX and PHOTOSELEX,” which describes nucleic acid libraries having expanded physical and chemical properties and their use in SELEX and photoSELEX.

[0099] SELEX can also be used to identify aptamers that have desirable off-rate characteristics. See U.S. Pat. No. 7,947,447, entitled “Method for Generating Aptamers with Improved Off-Rates,” which describes improved SELEX methods for generating aptamers that can bind to target molecules. Methods for producing aptamers and photoaptamers having slower rates of dissociation from their respective target molecules are described. The methods involve contacting the candidate mixture with the target molecule, allowing the formation of nucleic acid-target complexes to occur, and performing a slow off-rate enrichment process wherein nucleic acid-target complexes with fast dissociation rates dissociate and do not reform, while complexes with slow dissociation rates remain intact. Additionally, the methods include the use of modified nucleotides in the production of candidate nucleic acid mixtures to generate aptamers with improved off-rate performance (see U.S. Patent Publication No. 2009/0098549, entitled “SELEX and PhotoSELEX”). (See also U.S. Pat. No. 7,855,054 and U.S. Patent Publication No. 2007/0166740). Each of these applications is incorporated herein by reference in its entirety.

[0100] In some embodiments, methods of selecting aptamers that bind to a target molecule are provided, comprising: (a) preparing a candidate mixture of nucleic acids, wherein the candidate mixture comprises modified nucleic acids in which at least one pyrimidine in at least one, or in each, nucleic acid of the candidate mixture is chemically modified at the C5-position; (b) contacting the candidate mixture with a target molecule, wherein nucleic acids having an increased affinity to the target molecule relative to other nucleic acids in the candidate mixture bind the target molecule, forming nucleic acid-target molecule complexes; (c) partitioning the increased affinity nucleic acids from the remainder of the candidate mixture; and (d) amplifying the increased affinity nucleic acids to yield a mixture of nucleic acids enriched in nucleic acid sequences that are capable of binding to the target molecule with increased affinity, whereby an aptamer to the target molecule is identified. In certain embodiments, the method further includes performing a slow off-rate enrichment process.

[0101] “Target” or “target molecule” or “target” refers herein to any compound upon which a nucleic acid can act in a desirable manner. A target molecule can be a protein, peptide, nucleic acid, carbohydrate, lipid, polysaccharide, glycoprotein, hormone, receptor, antigen, antibody, virus, pathogen, toxic substance, substrate, metabolite, transition state analog, cofactor, inhibitor, drug, dye, nutrient, growth factor, cell, tissue, any portion or fragment of any of the foregoing, etc., without limitation. Virtually any chemical or biological effector may be a suitable target. Molecules of any size can serve as targets. A target can also be modified in certain ways to enhance the likelihood or strength of an interaction between the target and the nucleic acid. A target can also include any minor variation of a particular compound or molecule, such as, in the case of a protein, for example, minor variations in amino acid sequence, disulfide bond formation, glycosylation, lipidation, acetylation, phosphorylation, or any other manipulation or modification, such as conjugation with a labeling component, which does not substantially alter the identity of the molecule. A “target molecule” or “target” is a set of copies of one type or species of molecule or multimolecular structure that is capable of binding to an aptamer. “Target molecules” or “targets” refer to more than one such set of molecules. Embodiments of the SELEX process in which the target is a peptide are described in U.S. Pat. No. 6,376,190, entitled “Modified SELEX Processes Without Purified Protein.”

### Exemplary PDGF Aptamers

[0102] The PDGF aptamers of the instant disclosure were identified using the improved SELEX method for identifying aptamers having slow off-rates as described in Example 1, which describes a representative method for the selection and production of an aptamer that binds PDGF with a slow dissociation rate. A random DNA library composed of benzyl-dU (Bn-dU), dA, dC and dG was used for the selection. Using this method, the DNA aptamer to PDGF-BB designated as aptamer 4149-8_{—}1 (SEQ ID NO: 1) was identified.

[0103] Using aptamer 4149-8_{—}1 (SEQ ID NO: 1), studies were conducted to identify the minimum sequence length required to maintain strong affinity for PDGF. Systematic truncation from the 5′ and 3′ ends led to identification of a core motif consisting of 29 nucleotides (4149-8_{—}38; SEQ ID NO. 38). Aptamer 4149-8_{—}38 exhibited high affinity binding to PDGF-BB (K_{d} value of 20 pM; FIG. 6).

[0104] Additional sequencing studies were conducted on the sequence pool from which aptamer 4149-8_{—}1 (SEQ ID NO: 1) was selected. 454 sequencing, which is a large-scale, high throughput method that uses parallel pyrosequencing, provides unbiased sample preparation and very accurate sequence analysis. The sequencing data was used to identify a consensus sequence for a PDGF aptamer as shown in FIG. 3. Furthermore, nucleotide substitution studies illustrated in FIG. 6 led to the discovery that six of eight BndU positions in the consensus sequence were desirable for PDGF binding, but four BndU positions could be replaced with dT with little or no loss of binding activity. A consensus sequence is shown in FIG. 3A, along with a graphic representation of the nucleotide frequency at each position relative to the apatmer 4149-8_i (SEQ ID NO: 1).

[0105] In some embodiments, a PDGF aptamer comprises the sequence:

(SEQ ID NO: 500)
5′-NZVSLₙS′V′ZACNNₘGCGZZZAZAGCG-3′,

wherein
V is selected from an A, C or G;
V′ is selected from a C, G or Z, wherein V′ is complementary to V;
S and S′ are independently selected from a C or G, wherein S and S′ are complementary to each other;
each N is independently selected from any naturally occurring or modified nucleotide;
each Z is independently selected from a modified pyrimidine;
L is selected from any naturally occurring or modified nucleotide, a hydrocarbon linker, a polyethylene glycol linker or a combination thereof;
n is 0 to 20; and m is 0 to 20; and wherein one or more nucleotide insertions are optionally included.

[0106] In some embodiments, a PDGF aptamer comprises the sequence:

(SEQ ID NO: 501)
5′-ZZVSLₙS′V′ZACNNₘGCGZZZAZAGCG-3′,

wherein V, V′, N, S, S′, Z, L, n, and m are as defined above.

[0107] In some embodiments, a PDGF aptamer comprises the sequence:

(SEQ ID NO: 502)
5′-ZZVCLₙGV′ZACNMGCGZZZAZAGCG-3′,

wherein Z, V, V′, N, Z, L, and n are as defined above and M is selected from C and A.

[0108] In some embodiments, a PDGF aptamer comprises the sequence:

(SEQ ID NO: 503)
5′-ZZACLₙGZZACACGCGZZZAZAGCG-3′,

wherein Z, L, and n are as defined above.

[0109] In some embodiments, a PDGF aptamer comprises the sequence:

(SEQ ID NO: 504)
5′-ZZACGACZACGZZACACGCGZZZAZAGCG-3′,

wherein Z is as defined above.

[0110] In some embodiments, a PDGF aptamer comprises the sequence:

(SEQ ID NO: 507)
5′-ZVSLₙS′V′ZACNNₘGCGZZZAZAG-3′,

wherein
V is selected from an A, C or G;
V′ is selected from a C, G or Z, wherein V′ is complementary to V;
S and S′ are independently selected from a C or G, wherein S and S′ are complementary to other;
each N is independently selected from modified or unmodified nucleotide;
each Z is independently selected from a modified pyrimidine;
L is selected from a substituted or unsubstituted C₂-C₂₀ linker and a modified or unmodified nucleotide;
n is 1 to 50; and m is 0 to 50; and
wherein one or more nucleotide insertions are optionally included.

[0111] In some embodiments, a PDGF aptamer comprises the sequence:

(SEQ ID NO: 508)
5′-Z′ZVSLₙS′V′ZACNNₘGCGZZZAZAGC-3′,

wherein Z′ is a modified pyrimidine or dT; and V, V′, N, S, S′, Z, L, n, and m are as defined above.

[0112] In some embodiments, a PDGF aptamer comprises the sequence:

(SEQ ID NO: 509)
5′-Z′ZVCLₙGV′ZACNMGCGZZZAZAGC-3′,

wherein Z, Z′, V, V′, N, Z, L, and n are as defined above and M is selected from C and A.

[0113] In some embodiments, a PDGF aptamer comprises the sequence:

(SEQ ID NO: 510)
5′-Z′ZACLₙGZZACACGCGZZZAZAGC-3′,

wherein Z, Z′, L, and n are as defined above.

[0114] In some embodiments, a PDGF aptamer comprises the sequence:

(SEQ ID NO: 511)
5′-Z′ZACGACZACGZZACACGCGZZZAZAGC-3′,

wherein Z and Z′ are as defined above.

[0115] In some embodiments, a PDGF aptamer comprises the sequence:

(SEQ ID NO: 505)
5′-ZABLₚGYZABK_{q}GCGZZYDYAG-3′

wherein each Z is, independently, a modified pyrimidine;
each B is independently selected from C and a substituted or unsubstituted C₂-C₁₀ linker;
each L is independently selected from a substituted or unsubstituted C₂-C₁₀ linker, a hexaethylene glycol linker, and a modified or unmodified nucleotide, wherein p is 1 to 10;
each Y is independently selected from a modified or unmodified pyrimidine;
each K is independently selected from a substituted or unsubstituted C₂-C₁₀ linker, a hexaethylene glycol linker, and a modified or unmodified nucleotide, wherein q is 1 to 5; and
D is selected from A and a substituted or unsubstituted C₂-C₁₀ linker.

[0116] In some embodiments, a PDGF aptamer comprises the sequence:

(SEQ ID NO: 506)
5′-XZABLₙGYZABLₙGCGZZYDYAGBE-3′,

wherein X is selected from a modified or unmodified pyrimidine and a substituted or unsubstituted C₂-C₁₀ linker, or is absent; and E is selected from G and a substituted or unsubstituted C₂-C₁₀ linker, or is absent.

[0117] An aptamer construct comprising the sequences NZVS (SEQ ID NO 761) and

(SEQ ID NO: 762)
S′V′ZACNNₘGCGZZZAZAGCG,

wherein
V is selected from an A, C or G; V′ is selected from a C, G or Z, wherein V′ is selected from a C, G or Z, wherein V′ is complementary to V;
S and S′ are independently selected from a C or G, wherein S and S′ are complementary to each other;
N is independently selected from any naturally occurring or modified nucleotide;
Z is independently selected from a modified pyrimidine;
m is 1 to 20; and
wherein one or more nucleotide insertions are optionally included.

[0118] In some embodiments, Z is a modified uridine. In some embodiments, each Z is independently selected from the C-5 modified pyrimidines as defined herein. In some embodiments, each Z is independently selected from
[0119] 5-(N-benzylcarboxyamide)-2′-deoxyuridine (BndU),
[0120] 5-(N-benzylcarboxyamide)-2′-O-methyluridine,
[0121] 5-(N-benzylcarboxyamide)-2′-fluorouridine,
[0122] 5-(N-phenethylcarboxyamide)-2′-deoxyuridine (PEdU),
[0123] 5-(N-thiophenylmethylcarboxyamide)-2′-deoxyuridine (ThdU),
[0124] 5-(N-isobutylcarboxyamide)-2′-deoxyuridine (iBudU),
[0125] 5-(N-tyrosylcarboxyamide)-2′-deoxyuridine (TyrdU),
[0126] 5-(N-3,4-methylenedioxybenzylcarboxyamide)-2′-deoxyuridine (MBndU),
[0127] 5-(N-4-fluorobenzylcarboxyamide)-2′-deoxyuridine (FBndU),
[0128] 5-(N-3-phenylpropylcarboxyamide)-2′-deoxyuridine (PPdU),
[0129] 5-(N-imidizolylethylcarboxyamide)-2′-deoxyuridine (ImdU),
[0130] 5-(N-isobutylcarboxyamide)-2′-O-methyluridine,
[0131] 5-(N-isobutylcarboxyamide)-2′-fluorouridine,
[0132] 5-(N-tryptaminocarboxyamide)-2′-deoxyuridine (TrpdU),
[0133] 5-(N—R-threoninylcarboxyamide)-2′-deoxyuridine (ThrdU),
[0134] 5-(N-tryptaminocarboxyamide)-2′-O-methyluridine,
[0135] 5-(N-tryptaminocarboxyamide)-2′-fluorouridine,
[0136] 5-(N-[1-(3-trimethylamonium) propyl]carboxyamide)-2′-deoxyuridine chloride,
[0137] 5-(N-naphthylmethylcarboxyamide)-2′-deoxyuridine (NapdU),
[0138] 5-(N-naphthylmethylcarboxyamide)-2′-O-methyluridine,
[0139] 5-(N-naphthylmethylcarboxyamide)-2′-fluorouridine,
[0140] 5-(N-[1-(2,3-dihydroxypropyl)]carboxyamide)-2′-deoxyuridine),
[0141] 5-(N-2-naphthylmethylcarboxyamide)-2′-deoxyuridine (2NapdU),
[0142] 5-(N-2-naphthylmethylcarboxyamide)-2′-O-methyluridine,
[0143] 5-(N-2-naphthylmethylcarboxyamide)-2′-fluorouridine,
[0144] 5-(N-1-naphthylethylcarboxyamide)-2′-deoxyuridine (NEdU),
[0145] 5-(N-1-naphthylethylcarboxyamide)-2′-O-methyluridine,
[0146] 5-(N-1-naphthylethylcarboxyamide)-2′-fluorouridine,
[0147] 5-(N-2-naphthylethylcarboxyamide)-2′-deoxyuridine (2NEdU),
[0148] 5-(N-2-naphthylethylcarboxyamide)-2′-O-methyluridine,
[0149] 5-(N-2-naphthylethylcarboxyamide)-2′-fluorouridine,
[0150] 5-(N-3-benzofuranylethylcarboxyamide)-2′-deoxyuridine (BFdU),
[0151] 5-(N-3-benzofuranylethylcarboxyamide)-2′-O-methyluridine,
[0152] 5-(N-3-benzofuranylethylcarboxyamide)-2′-fluorouridine,
[0153] 5-(N-3-benzothiophenylethylcarboxyamide)-2′-deoxyuridine (BTdU),
[0154] 5-(N-3-benzothiophenylethylcarboxyamide)-2′-O-methyluridine, and
[0155] 5-(N-3-benzothiophenylethylcarboxyamide)-2′-fluorouridine.

[0156] In certain embodiments, portions of the PDGF and/or VEGF aptamer (Y) may not be necessary to maintain binding and certain portions of the contiguous PDGF and/or VEGF aptamer can be modified, including, but not limited to, replacement with a spacer or linker moiety. In these embodiments, for example, Y can be represented as Y′-Q-Y″-Q′-Y′″, wherein Y′, Y″ and Y′″ are parts of a PDGF and/or VEGF aptamer or segments of different PDGF and/or VEGF aptamers and Q and/or Q′ are spacers or linker molecules that modify certain nucleic acid features of the original PDGF and/or VEGF aptamer. When Q and Q′ are not present, Y′, Y″, and Y′″ represent one contiguous PDGF and/or VEGF aptamer (Y).

[0157] As used herein a “linker” is a molecular entity that connects two or more molecular entities through covalent bond or non-covalent interactions and can allow spatial separation of the molecular entities in a manner that preserves the functional properties of one or more of the molecular entities. A linker can also be known as a spacer. Appropriate linker sequences will be readily ascertained by those of skill in the art based upon the present disclosure.

[0158] As used herein, a linker can comprise one or more molecules or sub-components, selected from the group including, but not limited to, a polynucleotide, a polypeptide, a peptide nucleic acid, a locked nucleic acid, an oligosaccharide, a polysaccharide, an antibody, an affybody, an antibody mimic, an aliphatic, aromatic or heteroaromatic carbon molecule, a polyethylene glycol (PEG) molecule, a cell receptor, a ligand, a lipid, any fragment or derivative of these structures, any combination of the foregoing, or any other chemical structure or component.

[0159] In some embodiments, at least one L is a polyethylene glycol linker. In some embodiments, at least one L is a hexaethylene glycol linker. In some embodiments, L is a substituted or unsubstituted C₂-C₁₀ linker. In some embodiments, p is 1, 2, 3, 4, 5, 6, 7, or 8. In some embodiments, p is 1, 2, or 3. In some embodiments, at least one K is a polyethylene glycol linker. In some embodiments, at least one K is a hexaethylene glycol linker. In some embodiments, K is a substituted or unsubstituted C₂-C₁₀ linker. In some embodiments, q is 1 or 2. In some embodiments, q is 1.

[0160] In various embodiments, m may be 0 to 20, 0 to 19, 0 to 18, 0 to 17, 0 to 16, 0 to 15, 0 to 15, 0 to 14, 0 to 13, 0 to 12, 0 to 11, 0 to 10, 0 to 9, 0 to 8, 0 to 7, 0 to 6, 0 to 5, 0 to 4, or 0 to 3.

[0161] In some embodiments, L may be a linker such as an 18-atom hexaethylene glycol linker. In some embodiments, the L may be a combination of nucleotides and a linker. As a nonlimiting example, the following aptamers (SEQ ID NOs 67 and 69) include a hexaethylene glycol (Heg) linker:

(SEQ ID NO. 67)
5′-Bn-Bn-A-C-Heg-G-Bn-Bn-A-C-A-C-G-C-G-Bn-Bn-
Bn-A-Bn-A-G-C-G-3′
(SEQ ID NO. 69)
5′-Bn-Bn-A-C-G-Heg-C-G-Bn-Bn-A-C-A-C-G-C-G-Bn-
Bn-Bn-A-Bn-A-G-C-G-3′

[0162] wherein Bn is benzyl-dU and Heg is a hexaethylene glycol linker.

[0163] In some embodiments, an N may be replaced by a linker, such as in the following aptamers:

(SEQ ID NO. 329)
5′-Bn-Bn-A-C-Heg-G-Bn-Bn-A-C-C3-G-C-G-Bn-Bn-
Bn-A-Bn-A-G-C-3′
(SEQ ID NO. 408)
5′-Bn-Bn-A-C-Heg-G-Bn-Bn-A-C-C3-C-G-Bn-Bn-Bn-
A-Bn-A-G-3′

wherein Bn is benzyl-dU, Heg is a hexaethylene glycol linker and C3 is a three carbon linker.

[0164] Further PDGF aptamers were identified using the improved SELEX method for identifying aptamers having slow off-rates as described in Example 5, which describes a representative method for the selection and production of an aptamer that binds PDGF with a slow dissociation rate. A random DNA library composed of napthyl-dU (Nap-dU), dA, dC and dG was used for the selection. PDGF aptamer 5169-4_{—}26 was identified in the screen.

[0165] In some embodiments, an aptamer that specifically binds PDGF is provided, wherein the aptamer competes for binding to PDGF with PDGF aptamer 5169-4_{—}26. In some such embodiments, the aptamer comprises at least one modified nucleoside comprising a hydrophobic nucleobase modification. Further, in some such embodiments, the hydrophobic nucleobase modification is a modified pyrimidine. In some embodiments, each modified pyrimidine may be independently selected from 5-(N-benzylcarboxyamide)-2′-deoxyuridine (BndU), 5-(N-benzylcarboxyamide)-2′-O-methyluridine, 5-(N-benzylcarboxyamide)-2′-fluorouridine, 5-(N-phenethylcarboxyamide)-2′-deoxyuridine (PedU), 5-(N-thiophenylmethylcarboxyamide)-2′-deoxyuridine (ThdU), 5-(N-isobutylcarboxyamide)-2′-deoxyuridine (iBudU), 5-(N-isobutylcarboxyamide)-2′-O-methyluridine, 5-(N-isobutylcarboxyamide)-2′-fluorouridine, 5-(N-tryptaminocarboxyamide)-2′-deoxyuridine (TrpdU), 5-(N-tryptaminocarboxyamide)-2′-O-methyluridine, 5-(N-tryptaminocarboxyamide)-2′-fluorouridine, 5-(N-[1-(3-trimethylamonium) propyl]carboxyamide)-2′-deoxyuridine chloride, 5-(N-naphthylmethylcarboxyamide)-2′-deoxyuridine (NapdU), 5-(N-naphthylmethylcarboxyamide)-2′-O-methyluridine, 5-(N-naphthylmethylcarboxyamide)-2′-fluorouridine, and 5-(N-[1-(2,3-dihydroxypropyl)]carboxyamide)-2′-deoxyuridine).

[0166] In some embodiments, an aptamer that specifically bind PDGF is provided, wherein the aptamer comprises the sequence:

(SEQ ID NO. 512)
5′-ACALₙZGZAZGLₘZLZ-3′;

wherein each Z is, independently, a modified pyrimidine; each L is independently selected from a substituted or unsubstituted C₂-C₅₀ linker, a polyethylene glycol linker, and a modified or unmodified nucleotide; n is 1 to 5; and m is 1 to 10.

[0167] In some embodiments, each is independently selected from 5-(N-benzylcarboxyamide)-2′-deoxyuridine (BndU), 5-(N-benzylcarboxyamide)-2′-O-methyluridine, 5-(N-benzylcarboxyamide)-2′-fluorouridine, 5-(N-phenethylcarboxyamide)-2′-deoxyuridine (PedU), 5-(N-thiophenylmethylcarboxyamide)-2′-deoxyuridine (ThdU), 5-(N-isobutylcarboxyamide)-2′-deoxyuridine (iBudU), 5-(N-isobutylcarboxyamide)-2′-O-methyluridine, 5-(N-isobutylcarboxyamide)-2′-fluorouridine, 5-(N-tryptaminocarboxyamide)-2′-deoxyuridine (TrpdU), 5-(N-tryptaminocarboxyamide)-2′-O-methyluridine, 5-(N-tryptaminocarboxyamide)-2′-fluorouridine, 5-(N-[1-(3-trimethylamonium) propyl]carboxyamide)-2′-deoxyuridine chloride, 5-(N-naphthylmethylcarboxyamide)-2′-deoxyuridine (NapdU), 5-(N-naphthylmethylcarboxyamide)-2′-O-methyluridine, 5-(N-naphthylmethylcarboxyamide)-2′-fluorouridine, and 5-(N-[1-(2,3-dihydroxypropyl)]carboxyamide)-2′-deoxyuridine). In some embodiments, at least one, at least two, at least three, at least four, or each Z is 5-(N-naphthylmethylcarboxyamide)-2′-deoxyuridine (NapdU). In some embodiments, n is 1, 2, 3, 4, or 5. In some embodiments, m is 1, 2, 3, 4, 5, 6, 7, 8, 9, or 10. In some embodiments, n is 3. In some embodiments, m is 4. In some such embodiments, each L is independently selected from a modified nucleotide, an unmodified nucleotide, and a C₃ linker.

[0168] A C₂-C₅₀ linker or spacer may be a backbone comprising a chain of 2 to 50 carbon atoms (C₂-C₅₀) (saturated, unsaturated, straight chain, branched or cyclic), 0 to 10 aryl groups, 0 to 10 heteroaryl groups, and 0 to 10 heterocyclic groups, optionally comprising an ether (—O—) linkage, (e.g., one or more alkylene glycol units, including but not limited to one or more ethylene glycol units —O—(CH₂CH₂O)—; one or more 1,3-propane diol units —O—(CH₂CH₂CH₂O)—, etc.); an amine (—NH—) linkage; an amide (—NC(O)—) linkage; and a thioether (—S—) linkage; etc.; wherein each backbone carbon atom may be independently unsubstituted (i.e., comprising —H substituents) or may be substituted with one or more groups selected from a C₁ to C₃ alkyl, —OH, —NH₂, —SH, —O—(C₁ to C₆ alkyl), —S—(C₁ to C₆ alkyl), halogen, —OC(O)(C₁ to C₆ alkyl), —NH—(C₁ to C₆ alkyl), and the like. In some embodiments, a C₂-C₅₀ linker is a C₂-C₂₀ linker, a C₂-C₁₀ linker, a C₂-C₈ linker, a C₂-C₆ linker, a C₂-C₅ linker, a C₂-C₄ linker, or a C₃ linker, wherein each carbon may be independently substituted as described above.

[0169] In some embodiments, one or more nucleosides of a PDGF aptamer comprise a modification selected from a 2′-position sugar modification (such as a 2′-amino (2′-NH₂), a 2′-fluoro (2′-F), or a 2′-O-methyl (2′-OMe)), a modification at a cytosine exocyclic amine, an internucleoside linkage modification, and a 5-methyl-cytosine. In some embodiments, a PDGF aptamer comprises a 3′ cap, a 5′ cap, and/or an inverted deoxythymidine at the 3′ terminus.

[0170] In some embodiments, a PDGF aptamer comprises at least one modified internucleoside linkage. In some embodiments, at least one, at least two, at least three, at least four, or at least five internucleoside linkages are phosphorothioate linkages.

[0171] In some embodiments, a PDGF aptamer has a sequence selected from the sequences shown in Tables 1, 2 and 6 to 9 (SEQ ID NOS: 1 to 499 and 517 to 545). In some embodiments, a PDGF aptamer has a sequence selected from the sequences shown in Table 1 and the sequences shown in Tables 6 to 9 that bind PDGF with an affinity (K_{d}) of less than 10 nM. In some embodiments, a PDGF aptamer has a sequence that is at least 90%, at least 91%, at least 92%, at least 93%, at least 94%, at least 95%, at least 96%, at least 97%, at least 98%, at least 99%, or 100% identical to the sequences shown in Tables 1, 2, and 6 to 9 (SEQ ID NOS: 1 to 1 to 499 and 517 to 545). In some embodiments, a PDGF aptamer has a sequence that is at least 90%, at least 91%, at least 92%, at least 93%, at least 94%, at least 95%, at least 96%, at least 97%, at least 98%, at least 99%, or 100% identical to the sequences shown in Table 1 and the sequences shown in Tables 6 to 9 that bind PDGF with an affinity (K_{d}) of less than 10 nM.

[0172] The terms “sequence identity”, “percent sequence identity”, “percent identity”, “% identical”, “% identity”, and variations thereof, when used in the context of two nucleic acid sequences, are used interchangeably to refer to the number of nucleotide bases that are the same in a query nucleic acid or a portion of a query nucleic acid, when it is compared and aligned for maximum correspondence to a reference nucleic acid, divided by either (1) the number of nucleotide bases in the query sequence between and including the most 5′ corresponding (i.e., aligned) nucleotide base and the most 3′ corresponding (i.e., aligned) nucleotide base, or (2) the total length of the reference sequence, whichever is greater. Exemplary alignment of sequences for comparison can be conducted, e.g., by the local homology algorithm of Smith and Waterman (1981) Adv. Appl. Math. 2:482, by the homology alignment algorithm of Needleman and Wunsch (1970) J. Mol. Biol. 48:443, by the search for similarity method of Pearson and Lipman (1988) Proc. Nat'l. Acad. Sci. USA 85:2444, by computerized implementations of these algorithms (GAP, BESTFIT, FASTA, and TFASTA in the Wisconsin Genetics Software Package, Genetics Computer Group, 575 Science Dr., Madison, Wis.), or by visual inspection (see generally, Ausubel, F. M. et al. (1987), Current Protocols in Molecular Biology, Greene Publishing Assoc. and Wiley-Interscience).

[0173] One example of an algorithm that is suitable for determining percent sequence identity is the algorithm used in the basic local alignment search tool (hereinafter “BLAST”), see, e.g. Altschul et al. (1990) J. Mol. Biol. 215:403 and Altschul et al. (1997) Nucleic Acids Res. 15:3389. Software for performing BLAST analyses is publicly available through the National Center for Biotechnology Information (hereinafter “NCBI”). The default parameters used in determining sequence identity using the software available from NCBI, e.g., BLASTN (for nucleotide sequences) are described in McGinnis et al. (2004) Nucleic Acids Res. 32:W20.

[0174] As used herein, when describing the percent identity of a nucleic acid, such as a PDGF aptamer, the sequence of which is at least, for example, about 95% identical to a reference nucleotide sequence, it is intended that the nucleic acid sequence is identical to the reference sequence except that the nucleic acid sequence may include up to five point mutations per each 100 nucleotides of the reference nucleic acid sequence. In other words, to obtain a desired nucleic acid sequence, the sequence of which is at least about 95% identical to a reference nucleic acid sequence, up to 5% of the nucleotides in the reference sequence may be deleted or substituted with another nucleotide, or some number of nucleotides up to 5% of the total number of nucleotides in the reference sequence may be inserted into the reference sequence (referred to herein as an insertion). These mutations of the reference sequence to generate the desired sequence may occur at the 5′ or 3′ terminal positions of the reference nucleotide sequence or anywhere between those terminal positions, interspersed either individually among nucleotides in the reference sequence or in one or more contiguous groups within the reference sequence. Further, it is intended that a nucleotide base is considered “identical” for the purposes of determining percent identity, when the nucleotide base (1) is the same as the nucleotide base in the reference sequence, or (2) is derived from the nucleotide base in the reference sequence, or (3) is derived from the same nucleotide base from which the nucleotide base in the reference sequence is derived. For example, 5-methyl cytosine is considered to be “identical” to cytosine for the purposes of calculating percent identity. Similarly, the modified uridines shown in FIG. 12 are considered to be identical to one another for the purpose of determining percent identity. The reference sequence may be any one of the nucleotide sequences shown in SEQ ID NOS: 1 to 437.

[0175] In some embodiments, the present disclosure provides a PDGF aptamer that, upon binding PDGF, modulates a PDGF function. In some embodiments, a PDGF aptamer described herein inhibits PDGF-mediated phosphorylation of a PDGF receptor, such as PDGF Rα or PDGF Rβ. In some embodiments, a PDGF aptamer described herein inhibits PDGF-mediated phosphorylation of PDGF Rβ. In various embodiments, the PDGF aptamer modulates a PDGF function in vivo, such as inhibiting PDGF-mediated receptor phosphorylation in vivo. In various embodiments, the PDGF aptamer has a sequence selected from the sequences of SEQ ID NOS: 1 to 437. In various embodiments, the PDGF aptamer is selected from the aptamers shown in Tables 1 and 2. In various embodiments, the PDGF aptamer is selected from the aptamers shown in Table 1. In some embodiments, the PDGF aptamer comprises at least 12, at least 13, at least 14, at least 15, at least 16, at least 17, at least 18, at least 19, at least 20, at least 21, at least 21, at least 22, at least 23, at least 24, at least 25, at least 26, at least 27, at least 28, at least 29, or at least 30 contiguous nucleotides of a sequence selected from SEQ ID NOS: 1 to 1 to 499 and 517 to 545. In some embodiments, a PDGF aptamer consists of at least 12, at least 13, at least 14, at least 15, at least 16, at least 17, at least 18, at least 19, at least 20, at least 21, at least 21, at least 22, at least 23, at least 24, at least 25, at least 26, at least 27, at least 28, at least 29, or at least 30 contiguous nucleotides that are identical in nucleobase sequence to a sequence selected from SEQ ID NOS: 1 to 1 to 499 and 517 to 545. In some embodiments, the PDGF aptamer comprises at least 12, at least 13, at least 14, at least 15, at least 16, at least 17, at least 18, at least 19, at least 20, at least 21, at least 21, at least 22, at least 23, at least 24, at least 25, at least 26, at least 27, at least 28, at least 29, or at least 30 contiguous nucleotides of an aptamer shown in Table 1, 2, 6, 7, 8 or 9. In some embodiments, the PDGF aptamer comprises at least 12, at least 13, at least 14, at least 15, at least 16, at least 17, at least 18, at least 19, at least 20, at least 21, at least 21, at least 22, at least 23, at least 24, at least 25, at least 26, at least 27, at least 28, at least 29, or at least 30 contiguous nucleotides of an aptamer shown in Table 1 or an aptamer shown in one of Tables 6 to 9 that binds PDGF with an affinity (K_{d}) of less than 10 nM. In some embodiments, a PDGF aptamer consists of at least 12, at least 13, at least 14, at least 15, at least 16, at least 17, at least 18, at least 19, at least 20, at least 21, at least 21, at least 22, at least 23, at least 24, at least 25, at least 26, at least 27, at least 28, at least 29, or at least 30 contiguous nucleotides of an aptamer shown in Table 1, 2, 6, 7, 8 or 9. In some embodiments, a PDGF aptamer consists of at least 12, at least 13, at least 14, at least 15, at least 16, at least 17, at least 18, at least 19, at least 20, at least 21, at least 21, at least 22, at least 23, at least 24, at least 25, at least 26, at least 27, at least 28, at least 29, or at least 30 contiguous nucleotides of an aptamer shown in Table 1 or an aptamer shown in one of Tables 6 to 9 that binds PDGF with an affinity (K_{d}) of less than 10 nM.

[0176] In some embodiments, a PDGF aptamer has a nucleobase sequence selected from the sequences of SEQ ID NOS. 500 to 512; 761 and 762. In some embodiments, a PDGF aptamer has the sequence of any one of SEQ ID NOS: 1 to 1 to 499 and 517 to 545. In some embodiments, a PDGF aptamer is at least 95% identical, at least 90% identical, at least 85% identical, at least 80% identical, or at least 75% identical to any one of SEQ ID NOS: 1 to 1 to 499 and 517 to 545. In any of the embodiments herein, a PDGF aptamer may comprise additional nucleotides or other chemical moieties on the 5′ end, the 3′ end, or both the 5′ and the 3′ end of the aptamer.

[0177] The PDGF aptamer can contain any number of nucleotides in addition to the PDGF binding region. In various embodiments, the PDGF aptamer can include up to about 100 nucleotides, up to about 95 nucleotides, up to about 90 nucleotides, up to about 85 nucleotides, up to about 80 nucleotides, up to about 75 nucleotides, up to about 70 nucleotides, up to about 65 nucleotides, up to about 60 nucleotides, up to about 55 nucleotides, up to about 50 nucleotides, up to about 45 nucleotides, up to about 40 nucleotides, up to about 35 nucleotides, up to about 30 nucleotides, up to about 25 nucleotides, or up to about 20 nucleotides.

[0178] In some embodiments, the PDGF aptamer is selected from an aptamer that has similar binding characteristics and ability to treat PDGF associated atherosclerosis, macular degeneration, fibrosis, or cancer conditions as an aptamer selected from SEQ ID NOS: 1 to 1 to 499 and 517 to 545. In some embodiments, a PDGF aptamer binds to the same region of a PDGF-B monomer (in the context of a PDGF-BB or PDGF-AB dimer) as an aptamer selected from the aptamers shown in Tables 1, 2, and 6 to 9. In some embodiments, a PDGF aptamer binds to the same region of a PDGF-B monomer (in the context of a PDGF-BB or PDGF-AB dimer) as an aptamer selected from the aptamers shown in Table 1. In some embodiments, a PDGF aptamer binds to the same region of a PDGF-B monomer (in the context of a PDGF-BB or PDGF-AB dimer) as an aptamer selected from the aptamers shown in Table 6. In some embodiments, a PDGF aptamer binds to the same region of a PDGF-B monomer (in the context of a PDGF-BB or PDGF-AB dimer) as PDGF aptamer 4149-8_{—}260. In some embodiments, a PDGF aptamer binds to a region of PDGF-B comprising amino acids 24 to 86 of PDGF-B. In some such embodiments, the PDGF aptamer competes for binding to PDGF with PDGF aptamer 4149-8_{—}260. In some embodiments, a PDGF aptamer binds to PDGF-B with less than 15%, less than 14%, less than 13%, less than 12%, less than 11%, less than 10%, less than 9%, less than 8%, less than 7%, or less than 6% polar contacts to protein contact atoms. Polar contacts are defined as the sum of hydrogen bonds and charge-charge interactions. In some embodiments, a PDGF aptamer binds to PDGF-B with a ratio of polar contacts to interface area of less than 0.01, less than 0.009, less than 0.008, less than 0.007, or less than 0.006. In some embodiments, a PDGF aptamer binds to the same region of a PDGF-B monomer (in the context of a PDGF-BB or PDGF-AB dimer) as PDGF aptamer 5169-4_{—}26.

[0179] In some embodiments, a PDGF aptamer has any combination of the following characteristics:
[0180] (a) binds to a region of PDGF-B comprising amino acids 24 to 86 of PDGF-B;
[0181] (b) competes for binding to PDGF with PDGF aptamer 4149-8_{—}260;
[0182] (c) competes for binding to PDGF with PDGF aptamer 5169-4_{—}26;
[0183] (d) binds to PDGF-B with a ratio of polar contacts to interface area of less than 0.01, less than 0.009, less than 0.008, less than 0.007, or less than 0.006; and/or
[0184] (e) binds to PDGF-B with less than 15%, less than 14%, less than 13%, less than 12%, less than 11%, less than 10%, less than 9%, less than 8%, less than 7%, or less than 6% polar contacts to protein contact atoms.

[0185] The PDGF aptamer can be selected to have any suitable dissociation constant (K_{d}) for PDGF. In some embodiments, a PDGF aptamer has a dissociation constant (K_{d}) for PDGF of less than 30 nM, less than 25 nM, less than 20 nM, less than 15 nM, less than 10 nM, less than 9 nM, less than 8 nM, less than 7 nM, less than 6 nM, less than 5 nM, less than 4 nM, less than 3 nM, less than 2 nM, or less than 1 nM. Dissociation constants may be determined with a binding assay using a multi-point titration and fitting the equation y=(max−min)(Protein)/(K_{d}+Protein)+min as described in Example 3, below. In some embodiments, the PDGF aptamer is an aptamer with a K_{d} that is less than or equal to the K_{d} of an aptamer shown in any one of Tables 1, 2 or 6 to 9. In some embodiments, the PDGF aptamer is an aptamer with a K_{d} that is less than or equal to the K_{d} of an aptamer shown in Table 1 or Table 6.

[0186] Aptamer 4149-8_{—}1 binds in a 1:1 stoichiometry with a PDGF monomer. Since PDGF forms a tight homodimer that is required for reaction with its target receptors, a more efficient inhibition of PDGF activity might be achieved by using a dimeric or other multimeric form of aptamer 4149-8_{—}1. Thus, in some embodiments, the PDGF aptamer is a multimerization of any combination of the sequences of aptamer 4149-8_{—}1, 4149-8_{—}379, and SEQ ID NOS 500 to 512. In some embodiments, an aptamer construct comprises a first aptamer selected from any of the PDGF aptamers described herein, and a second aptamer comprising any of the PDGF aptamers described herein, wherein the first aptamer and the second aptamer may be the same or different. The first aptamer and the second aptamer of the PDGF aptamer construct may be covalently or noncovalently linked. Nonlimiting exemplary linkages are known in the art and/or are described herein. In some embodiments, a PDGF aptamer construct may be capable of binding two PDGF monomers simultaneously. In some embodiments, a PDGF aptamer construct binds PDGF with an affinity (K_{d}) of less than 10 nM.

### Exemplary VEGF Aptamers

[0187] The VEGF aptamers of the instant disclosure were identified using the improved SELEX method for identifying aptamers having slow off-rates as described in Example 7, which describes a representative method for the selection and production of an aptamer that binds VEGF with a slow dissociation rate.

[0188] We truncated a clone from a Nap-dU VEGF-121 SELEX experiment to a minimal sequence of 29 nucleotides. This SOMAmer binds to both VEGF-121 and VEGF-165 with high affinity (K_{d} values of 90 pM and 20 pM, respectively). The SOMAmer also potently inhibits the ability of both VEGF isoforms to induce VEGFR2 phosphorylation in human umbilical vein endothelial cells in vitro (see Example 9), supporting the notion that it binds to and blocks the receptor-binding domain on VEGF.

[0189] The present disclosure provides the first identification of an inhibitory aptamer to VEGF-121. Thus, the present VEGF aptamers represent broad inhibitors of VEGF, similar to protein-based drugs like bevacizumab (Avastin®), ranibizumab (Lucentis®) and aflibercept (Eylea®) (Papadopoulos et al. (2012) Angiogenesis 15:171; Yu et al. (2011) Biochem. Biophys. Res. Commun. 408:276. Thus, the present VEGF aptamers may more effectively inhibit VEGF signaling than Macugen®, which is a selective inhibitor of VEGF-165.

[0190] A truncated clone from the successful Nap-dU VEGF-121 SELEX experiment provided a sequence of 29 nucleotides. This aptamer (or SOMAmer) (4867-31 binds to both VEGF-121 and VEGF-165 with high affinity (K_{d} values of 90 pM and 20 pM, respectively). This SOMAmer also potently inhibits the ability of both VEGF isoforms to induce VEGFR2 phosphorylation in human umbilical vein endothelial cells in vitro, supporting the concept that it binds to and blocks the receptor-binding domain on VEGF.

[0191] Aptamer 4867-31_{—}192 binds in a 1:1 stoichiometry with a VEGF monomer. Since VEGF forms a tight homodimer that is required for reaction with its target receptors, a more efficient inhibition of VEGF activity might be achieved by using a dimeric or other multimeric form of aptamer 4867-31_{—}192. Thus, in some embodiments, the VEGF aptamer is a multimerization of any combination of the sequences of aptamer 4867-31_{—}192, SEQ ID NOS 513 to 516. In some embodiments, an aptamer construct comprises a first aptamer selected from any of the VEGF aptamers described herein, and a second aptamer comprising any of the VEGF aptamers described herein, wherein the first aptamer and the second aptamer may be the same or different. The first aptamer and the second aptamer of the VEGF aptamer construct may be covalently or noncovalently linked. Nonlimiting exemplary linkages are known in the art and/or are described herein. In some embodiments, a VEGF aptamer construct may be capable of binding two VEGF monomers simultaneously. In some embodiments, a VEGF aptamer construct binds VEGF with an affinity (K_{d}) of less than 10 nM.

[0192] In some embodiments, a VEGF aptamer binds VEGF-121 with a K_{d} of less than 10 nM. In some embodiments, the VEGF aptamer comprises one or more modified nucleotides. In some embodiments, the VEGF aptamer comprises one or more modified nucleotides comprising hydrophobic modification. In some embodiments, the VEGF aptamer comprises one or more modified pyrimidines. In some embodiments, the VEGF aptamer comprises one or more modified pyrimidines shown in FIG. 12. In some embodiments, the VEGF aptamer comprises one or more modified pyrimidines shown in FIG. 12, groups II to V. In some embodiments, the VEGF aptamer comprises one or more modified pyrimidines shown in FIG. 12, groups III to V. In some embodiments, the VEGF aptamer comprises one or more modified pyrimidines shown in FIG. 12, groups III and IV. In some embodiments, the VEGF aptamer comprises one or more (N-naphthylmethylcarboxyamide)-2′-deoxyuridines (NapdUs).

[0193] In some embodiments, a VEGF aptamer comprises the sequence:

(SEQ ID NO. 513)
5′-GZZQAAEZECZZEZDRGAZZZAAAZGG-3′

wherein each Z is a modified pyrimidine;
Q is selected from any modified or unmodified nucleotide and a substituted or unsubstituted C₂-C₅₀ linker, or is absent;
each E is independently selected from a G and a substituted or unsubstituted C₂-C₅₀ linker;
D is selected from A and a substituted or unsubstituted C₂-C₅₀ linker; and
R is selected from any modified or unmodified nucleotide and a substituted or unsubstituted
C₂-C₅₀ linker.

[0194] In some embodiments, a VEGF aptamer comprises a sequence selected from:

(SEQ ID NO. 514)
5′-CGZZQAAEZECZZEZDRGAZZZAAAZG-3′;
(SEQ ID NO. 513)
5′-GZZQAAEZECZZEZDRGAZZZAAAZGG-3′;
(SEQ ID NO. 515)
5′-CGZZQAAEZECZZEZDRGAZZZAAAZGG-3′;
and
(SEQ ID NO. 516)
5′-CCGZZQAAEZECZZEZDRGAZZZAAAZGG-3′;

wherein Z, Q, E, D, and R are as defined above.

[0195] In some embodiments, Z is a modified uridine. In some embodiments, each Z is independently selected from the C-5 modified pyrimidines as defined herein. In some embodiments, each Z is independently selected from:
[0196] 5-(N-benzylcarboxyamide)-2′-deoxyuridine (BndU),
[0197] 5-(N-benzylcarboxyamide)-2′-O-methyluridine,
[0198] 5-(N-benzylcarboxyamide)-2′-fluorouridine,
[0199] 5-(N-phenethylcarboxyamide)-2′-deoxyuridine (PEdU),
[0200] 5-(N-thiophenylmethylcarboxyamide)-2′-deoxyuridine (ThdU),
[0201] 5-(N-isobutylcarboxyamide)-2′-deoxyuridine (iBudU),
[0202] 5-(N-tyrosylcarboxyamide)-2′-deoxyuridine (TyrdU),
[0203] 5-(N-3,4-methylenedioxybenzylcarboxyamide)-2′-deoxyuridine (MBndU),
[0204] 5-(N-4-fluorobenzylcarboxyamide)-2′-deoxyuridine (FBndU),
[0205] 5-(N-3-phenylpropylcarboxyamide)-2′-deoxyuridine (PPdU),
[0206] 5-(N-imidizolylethylcarboxyamide)-2′-deoxyuridine (ImdU),
[0207] 5-(N-isobutylcarboxyamide)-2′-O-methyluridine,
[0208] 5-(N-isobutylcarboxyamide)-2′-fluorouridine,
[0209] 5-(N-tryptaminocarboxyamide)-2′-deoxyuridine (TrpdU),
[0210] 5-(N—R-threoninylcarboxyamide)-2′-deoxyuridine (ThrdU),
[0211] 5-(N-tryptaminocarboxyamide)-2′-O-methyluridine,
[0212] 5-(N-tryptaminocarboxyamide)-2′-fluorouridine,
[0213] 5-(N-[1-(3-trimethylamonium) propyl]carboxyamide)-2′-deoxyuridine chloride,
[0214] 5-(N-naphthylmethylcarboxyamide)-2′-deoxyuridine (NapdU),
[0215] 5-(N-naphthylmethylcarboxyamide)-2′-O-methyluridine,
[0216] 5-(N-naphthylmethylcarboxyamide)-2′-fluorouridine,
[0217] 5-(N-[1-(2,3-dihydroxypropyl)]carboxyamide)-2′-deoxyuridine),
[0218] 5-(N-2-naphthylmethylcarboxyamide)-2′-deoxyuridine (2NapdU),
[0219] 5-(N-2-naphthylmethylcarboxyamide)-2′-O-methyluridine,
[0220] 5-(N-2-naphthylmethylcarboxyamide)-2′-fluorouridine,
[0221] 5-(N-1-naphthylethylcarboxyamide)-2′-deoxyuridine (NEdU),
[0222] 5-(N-1-naphthylethylcarboxyamide)-2′-O-methyluridine,
[0223] 5-(N-1-naphthylethylcarboxyamide)-2′-fluorouridine,
[0224] 5-(N-2-naphthylethylcarboxyamide)-2′-deoxyuridine (2NEdU),
[0225] 5-(N-2-naphthylethylcarboxyamide)-2′-O-methyluridine,
[0226] 5-(N-2-naphthylethylcarboxyamide)-2′-fluorouridine,
[0227] 5-(N-3-benzofuranylethylcarboxyamide)-2′-deoxyuridine (BFdU),
[0228] 5-(N-3-benzofuranylethylcarboxyamide)-2′-O-methyluridine,
[0229] 5-(N-3-benzofuranylethylcarboxyamide)-2′-fluorouridine,
[0230] 5-(N-3-benzothiophenylethylcarboxyamide)-2′-deoxyuridine (BTdU),
[0231] 5-(N-3-benzothiophenylethylcarboxyamide)-2′-O-methyluridine, and
[0232] 5-(N-3-benzothiophenylethylcarboxyamide)-2′-fluorouridine.

[0233] In some embodiments, each Z is independently selected from the modified pyrimidines shown in FIG. 12, groups II to V. In some embodiments, each Z is independently selected from the modified pyrimidines shown in FIG. 12, groups III to V. In some embodiments, at least one, at least two, at least three, at least four, at least five, at least six, at least seven, or at least eight Zs are 5-(N-naphthylmethylcarboxyamide)-2′-deoxyuridine (NapdU). In some embodiments, each Z is independently selected from the modified pyrimidines shown in FIG. 12, groups III to IV. In some embodiments, each Z is 5-(N-naphthylmethylcarboxyamide)-2′-deoxyuridine (NapdU).

[0234] A C₂-C₅₀ linker or spacer may be a backbone comprising a chain of 2 to 50 carbon atoms (C₂-C₅₀) (saturated, unsaturated, straight chain, branched or cyclic), 0 to 10 aryl groups, 0 to 10 heteroaryl groups, and 0 to 10 heterocyclic groups, optionally comprising an ether (—O—) linkage, (e.g., one or more alkylene glycol units, including but not limited to one or more ethylene glycol units —O—(CH₂CH₂O)—; one or more 1,3-propane diol units —O—(CH₂CH₂CH₂O)—, etc.); an amine (—NH—) linkage; an amide (—NC(O)—) linkage; and a thioether (—S—) linkage; etc.; wherein each backbone carbon atom may be independently unsubstituted (i.e., comprising —H substituents) or may be substituted with one or more groups selected from a C₁ to C₃ alkyl, —OH, —NH₂, —SH, —O—(C₁ to C₆ alkyl), —S—(C₁ to C₆ alkyl), halogen, —OC(O)(C₁ to C₆ alkyl), —NH—(C₁ to C₆ alkyl), and the like. In some embodiments, a C₂-C₅₀ linker is a C₂-C₂₀ linker, a C₂-C₁₀ linker, a C₂-C₈ linker, a C₂-C₆ linker, a C₂-C₅ linker, a C₂-C₄ linker, or a C₃ linker, wherein each carbon may be independently substituted as described above.

[0235] In some embodiments, each substituted or unsubstituted C₂-C₅₀ linker is independently selected from a substituted or unsubstituted C₂-C₂₀ linker, a substituted or unsubstituted C₂-C₁₀ linker a substituted or unsubstituted C₂-C₈ linker, a substituted or unsubstituted C₂-C₆ linker, a substituted or unsubstituted C₂-C₅ linker, a substituted or unsubstituted C₂-C₄ linker, and a substituted or unsubstituted C₃ linker. In some embodiments, each substituted or unsubstituted C₂-C₅₀ linker is a substituted or unsubstituted C₂-C₁₀ linker. In some such embodiments, each substituted or unsubstituted C₂-C₁₀ linker is a substituted or unsubstituted C₂-C₈ linker, a substituted or unsubstituted C₂-C₆ linker, a substituted or unsubstituted C₂-C₅ linker, a substituted or unsubstituted C₂-C₄ linker, or a substituted or unsubstituted C₃ linker.

[0236] In some embodiments, one or more nucleosides of a VEGF aptamer comprise a modification selected from a 2′-position sugar modification (such as a 2′-amino (2′-NH₂), a 2′-fluoro (2′-F), or a 2′-O-methyl (2′-OMe)), a modification at a cytosine exocyclic amine, an internucleoside linkage modification, and a 5-methyl-cytosine. In some embodiments, a VEGF aptamer comprises a 3′ cap, a 5′ cap, and/or an inverted deoxythymidine at the 3′ terminus.

[0237] In some embodiments, a VEGF aptamer comprises at least one modified internucleoside linkage. In some embodiments, at least one, at least two, at least three, at least four, or at least five internucleoside linkages are phosphorothioate linkages.

[0238] In some embodiments, a VEGF aptamer has a sequence selected from the sequences shown in Tables 10 to 14. In some embodiments, a VEGF aptamer has a sequence selected from the sequences shown in Tables 10 to 14 that have a K_{d} of less than 10 nM. In some embodiments, a VEGF aptamer has a sequence that is at least 90%, at least 91%, at least 92%, at least 93%, at least 94%, at least 95%, at least 96%, at least 97%, at least 98%, at least 99%, or 100% identical to the sequences shown in Tables 10 to 14. In some embodiments, a VEGF aptamer has a sequence that is at least 90%, at least 91%, at least 92%, at least 93%, at least 94%, at least 95%, at least 96%, at least 97%, at least 98%, at least 99%, or 100% identical to the sequences shown in Tables 10 to 14 that have a K_{d} of less than 10 nM. Percent identity is determined as described above for PDGF aptamers, except that the reference sequences are the VEGF aptamer sequences shown in Tables 10 to 14, such as the sequences that have a K_{d} of less than 10 nM.

[0239] In some embodiments, the present disclosure provides a VEGF aptamer that, upon binding VEGF, modulates a VEGF function. In some embodiments, a VEGF aptamer inhibits VEGF-mediated phosphorylation of a VEGF receptor, such as VEGFR1 or VEGFR2. In some embodiments, a VEGF aptamer inhibits VEGF-mediated phosphorylation of VEGF receptor. In various embodiments, the VEGF aptamer modulates a VEGF function in vivo, such as inhibiting VEGF-mediated receptor phosphorylation in vivo. In various embodiments, the VEGF aptamer has a sequence selected from the sequences shown in Tables 10 to 14. In various embodiments, the VEGF aptamer is selected from the aptamers shown in Tables 10 to 14 that have a K_{d} of less than 10 nM. In various embodiments, the VEGF aptamer is selected from the aptamers shown in Tables 10 to 14. In some embodiments, the VEGF aptamer comprises at least 12, at least 13, at least 14, at least 15, at least 16, at least 17, at least 18, at least 19, at least 20, at least 21, at least 21, at least 22, at least 23, at least 24, at least 25, at least 26, at least 27, at least 28, at least 29, or at least 30 contiguous nucleotides of a sequence shown in Tables 10 to 14 that have a K_{d} of less than 10 nM. In some embodiments, a VEGF aptamer consists of at least 12, at least 13, at least 14, at least 15, at least 16, at least 17, at least 18, at least 19, at least 20, at least 21, at least 21, at least 22, at least 23, at least 24, at least 25, at least 26, at least 27, at least 28, at least 29, or at least 30 contiguous nucleotides that are identical in nucleobase sequence to a sequence shown in Tables 10 to 14 that have a K_{d} of less than 10 nM. In some embodiments, the VEGF aptamer comprises at least 12, at least 13, at least 14, at least 15, at least 16, at least 17, at least 18, at least 19, at least 20, at least 21, at least 21, at least 22, at least 23, at least 24, at least 25, at least 26, at least 27, at least 28, at least 29, or at least 30 contiguous nucleotides of an aptamer shown in Tables 10 to 14. In some embodiments, the VEGF aptamer comprises at least 12, at least 13, at least 14, at least 15, at least 16, at least 17, at least 18, at least 19, at least 20, at least 21, at least 21, at least 22, at least 23, at least 24, at least 25, at least 26, at least 27, at least 28, at least 29, or at least 30 contiguous nucleotides of an aptamer shown in Tables 10 to 14 that have a K_{d} of less than 10 nM. In some embodiments, a VEGF aptamer consists of at least 12, at least 13, at least 14, at least 15, at least 16, at least 17, at least 18, at least 19, at least 20, at least 21, at least 21, at least 22, at least 23, at least 24, at least 25, at least 26, at least 27, at least 28, at least 29, or at least 30 contiguous nucleotides of an aptamer shown in Tables 10 to 14. In some embodiments, a VEGF aptamer consists of at least 12, at least 13, at least 14, at least 15, at least 16, at least 17, at least 18, at least 19, at least 20, at least 21, at least 21, at least 22, at least 23, at least 24, at least 25, at least 26, at least 27, at least 28, at least 29, or at least 30 contiguous nucleotides of an aptamer shown in Tables 10 to 14 that have a K_{d} of less than 10 nM.

[0240] In any of the embodiments herein, a VEGF aptamer may comprise additional nucleotides or other chemical moieties on the 5′ end, the 3′ end, or both the 5′ and the 3′ end of the aptamer.

[0241] The VEGF aptamer can contain any number of nucleotides in addition to the VEGF binding region. In various embodiments, the VEGF aptamer can include up to about 100 nucleotides, up to about 95 nucleotides, up to about 90 nucleotides, up to about 85 nucleotides, up to about 80 nucleotides, up to about 75 nucleotides, up to about 70 nucleotides, up to about 65 nucleotides, up to about 60 nucleotides, up to about 55 nucleotides, up to about 50 nucleotides, up to about 45 nucleotides, up to about 40 nucleotides, up to about 35 nucleotides, up to about 30 nucleotides, up to about 25 nucleotides, or up to about 20 nucleotides.

[0242] In some embodiments, the VEGF aptamer is selected from an aptamer that has similar binding characteristics and ability to treat VEGF associated atherosclerosis, macular degeneration, fibrosis, and cancer conditions as an aptamer shown in Tables 10 to 14 have a K_{d} of less than 10 nM. In some embodiments, a VEGF aptamer binds to the same region of VEGF-121 as an aptamer selected from the aptamers shown in Tables 10 to 14 that have a K_{d} of less than 10 nM. In some embodiments, a VEGF aptamer binds to the same region of a VEGF-121 as a VEGF aptamer shown in Table 10, 11, 12, 13 or 14 that have a K_{d} of less than 10 nM. In some embodiments, a VEGF aptamer binds to the same region of VEGF-121 as VEGF aptamer 4867-31_{—}183.

[0243] The VEGF aptamer can be selected to have any suitable dissociation constant (K_{d}) for VEGF. In some embodiments, a VEGF aptamer has a dissociation constant (K_{d}) for VEGF-121 of less than 30 nM, less than 25 nM, less than 20 nM, less than 15 nM, less than 10 nM, less than 9 nM, less than 8 nM, less than 7 nM, less than 6 nM, less than 5 nM, less than 4 nM, less than 3 nM, less than 2 nM, or less than 1 nM. Dissociation constants may be determined with a binding assay using a multi-point titration and fitting the equation y=(max−min)(Protein)/(K_{d}+Protein)+min as described in Example 3, below.

[0244] In some embodiments, an aptamer construct comprises a first aptamer selected from any of the VEGF aptamers described herein, and a second aptamer comprising any of the VEGF aptamers described herein, wherein the first aptamer and the second aptamer may be the same or different. The first aptamer and the second aptamer of the VEGF aptamer construct may be covalently or noncovalently linked. Nonlimiting exemplary linkages are known in the art and/or are described herein. In some embodiments, a VEGF aptamer construct may be capable of binding two VEGF monomers simultaneously. In some embodiments, a VEGF aptamer construct binds VEGF with an affinity (K_{d}) of less than 10 nM.

### Exemplary PDGF/VEGF Aptamer Constructs

[0245] There is considerable evidence that more efficient blocking of tumor-associated and ocular angiogenesis, coupled with new blood vessel regression, is possible with combined inhibition of VEGF and PDGF-B signaling pathways (Bergers, G., et al. (2003) J. Clin. Invest. 111:1287; Jo, N., et al. (2006) Am. J. Pathol. 168:2036). This effect is mediated by the disruption of tight cell-cell association between endothelial cells, which form initial capillary sprouts, and periendothelial cells (or pericytes), which encircle the new blood vessels as they mature, rendering the blood vessels less susceptible to VEGF inhibitors (Benjamin, L. E., et al. (1998) Development 125:1591; Benjamin, L. E., et al. (1999) J. Clin. Invest. 103:159). The aptamers described herein can form the basis of such a dual inhibitor.

[0246] In some embodiments, a PDGF/VEGF aptamer construct comprises any of the PDGF aptamers described herein linked to any of the VEGF aptamers described herein. In some embodiments, a PDGF/VEGF aptamer construct comprises any of the PDGF aptamers shown in Table 1 linked to any of the VEGF aptamers shown in Table 10 to 14 that have a K_{d} less than 10 nM. The linkage may be covalent or noncovalent.

[0247] The PDGF/VEGF aptamer construct may comprise a PDGF aptamer and a VEGF aptamer in any orientation, such as a PDGF aptamer linked at or near its 3′ end to a point at or near the 5′ end of a VEGF aptamer, or a VEGF aptamer linked at or near its 3′ end to a point at or near the 5′ end of a PDGF aptamer, or any other orientation that preserves the binding properties of each aptamer of the construct.

[0248] In some embodiments in which the linkage is covalent, the PDGF/VEGF aptamer construct may be linked through a phosphate or phosphorothioate linkage. Many other covalent linkages are also contemplated, such as linkages through various linker moieties, including, but not limited to, hexaethylene glycol linkers, polyethylene glycol linkers, substituted or unsubstituted hyrdrocarbon linkers, etc. One skilled in the art can select a suitable covalent linkage for linking a PDGF aptamer to a VEGF aptamer.

[0249] In some embodiments, the PDGF aptamer and the VEGF aptamer are linked via a noncovalent linkage. Noncovalent linkages include, but are not limited to, biotin/streptavidin; metal-binding peptides/metals; hybridizable modified and/or unmodified oligonucleotides; etc. One of ordinary skill in the art can select a suitable noncovalent linkage for linking a PDGF aptamer to a VEGF aptamer.

### Pharmaceutical Compositions Comprising Aptamers and Aptamer Constructs

[0250] In some embodiments, pharmaceutical compositions comprising at least one aptamer or aptamer construct described herein and at least one pharmaceutically acceptable carrier are provided. Suitable carriers are described in “Remington: The Science and Practice of Pharmacy, Twenty-first Edition,” published by Lippincott Williams & Wilkins, which is incorporated herein by reference. Pharmaceutical compositions that include at least one aptamer or aptamer construct described herein and at least one pharmaceutically acceptable carrier may also include one or more active agents that is not a PDGF or VEGF inhibitor.

[0251] The aptamers described herein can be utilized in any pharmaceutically acceptable dosage form, including, but not limited to, injectable dosage forms, liquid dispersions, gels, aerosols, ointments, creams, lyophilized formulations, dry powders, tablets, capsules, controlled release formulations, fast melt formulations, delayed release formulations, extended release formulations, pulsatile release formulations, mixed immediate release and controlled release formulations, etc. Specifically, the aptamers described herein can be formulated: (a) for administration selected from any of oral, pulmonary, intravenous, intra-arterial, intrathecal, intra-articular, rectal, ophthalmic, colonic, parenteral, intracisternal, intravaginal, intraperitoneal, local, buccal, nasal, and topical administration; (b) into a dosage form selected from any of liquid dispersions, gels, aerosols, ointments, creams, tablets, sachets and capsules; (c) into a dosage form selected from any of lyophilized formulations, dry powders, fast melt formulations, controlled release formulations, delayed release formulations, extended release formulations, pulsatile release formulations, and mixed immediate release and controlled release formulations; or (d) any combination thereof.

[0252] Solutions or suspensions used for parenteral, intradermal, or subcutaneous application can comprise one or more of the following components: (1) a sterile diluent such as water for injection, saline solution, fixed oils, polyethylene glycols, glycerine, propylene glycol or other synthetic solvents; (2) antibacterial agents such as benzyl alcohol or methyl parabens; (3) antioxidants such as ascorbic acid or sodium bisulfite; (4) chelating agents such as ethylenediaminetetraacetic acid; (5) buffers such as acetates, citrates or phosphates; and (5) agents for the adjustment of tonicity such as sodium chloride or dextrose. The pH can be adjusted with acids or bases, such as hydrochloric acid or sodium hydroxide. A parenteral preparation can be enclosed in ampoules, disposable syringes or multiple dose vials made of glass or plastic.

[0253] Pharmaceutical compositions suitable for injectable use may include sterile aqueous solutions (where water soluble) or dispersions and sterile powders for the extemporaneous preparation of sterile injectable solutions or dispersion. For intravenous administration, suitable carriers include physiological saline, bacteriostatic water, Cremophor EL (BASF, Parsippany, N.J.) or phosphate buffered saline (PBS). In all cases, the composition should be sterile and should be fluid to the extent that easy syringability exists. The pharmaceutical composition should be stable under the conditions of manufacture and storage and should be preserved against the contaminating action of microorganisms such as bacteria and fungi. The term “stable”, as used herein, means remaining in a state or condition that is suitable for administration to a subject.

[0254] The carrier can be a solvent or dispersion medium, including, for example, water, ethanol, polyol (for example, glycerol, propylene glycol, and liquid polyethylene glycol, and the like), and suitable mixtures thereof. The proper fluidity can be maintained, for example, by the use of a coating such as lecithin, by the maintenance of the required particle size in the case of dispersion, and by the use of surfactants. Prevention of the action of microorganisms can be achieved by various antibacterial and antifungal agents, for example, parabens, chlorobutanol, phenol, ascorbic acid, thimerosal, and the like. In many cases, it will be preferable to include isotonic agents, for example, sugars, polyalcohols such as mannitol or sorbitol, and inorganic salts such as sodium chloride, in the composition. Prolonged absorption of the injectable compositions can be brought about by including in the composition an agent which delays absorption, for example, aluminum monostearate and gelatin.

[0255] Sterile injectable solutions can be prepared by incorporating the active reagent (e.g., an aptamer, and/or an aptamer construct) in an appropriate amount in an appropriate solvent with one or a combination of ingredients enumerated above, as desired, followed by filtered sterilization. Generally, dispersions are prepared by incorporating at least one aptamer, and/or aptamer construct into a sterile vehicle that contains a basic dispersion medium and any other desired ingredient. In the case of sterile powders for the preparation of sterile injectable solutions, exemplary methods of preparation include vacuum drying and freeze-drying, both of which will yield a powder of an aptamer, and/or an aptamer construct plus any additional desired ingredient from a previously sterile-filtered solution thereof.

[0256] In some embodiments, an aptamer, and/or an aptamer construct is formulated for intravitreal injection. Suitable formulations for intravitreal administration are described, e.g., in. Ocular drug delivery is discussed, e.g., in Rawas-Qalaji et al. (2012) Curr. Eye Res. 37: 345; Bochot et al. (2012) J. Control Release 161:628; Yasukawa et al. (2011) Recent Pat. Drug Deliv. Formul. 5:1; and Doshi et al. (2011) Semin. Ophthalmol. 26:104. In some embodiments, a pharmaceutical composition comprising an aptamer, and/or an aptamer construct is administered by intravitreal injection once per week, once per two weeks, once per three weeks, once per four weeks, once per five weeks, once per six weeks, once per seven weeks, once per eight weeks, once per nine weeks, once per 10 weeks, once per 11 weeks, once per 12 weeks, or less often than once per 12 weeks.

[0257] Oral compositions generally include an inert diluent or an edible carrier. They can be enclosed, for example, in gelatin capsules or compressed into tablets. For the purpose of oral therapeutic administration, the aptamer, and/or aptamer construct can be incorporated with excipients and used in the form of tablets, troches, or capsules. Oral compositions can also be prepared using a fluid carrier for use as a mouthwash, wherein the compound in the fluid carrier is applied orally and swished and expectorated or swallowed. Pharmaceutically compatible binding agents, and/or adjuvant materials can be included as part of the composition.

[0258] For administration by inhalation, the compounds are delivered in the form of an aerosol spray from a pressured container or dispenser that contains a suitable propellant, e.g., a gas such as carbon dioxide, a nebulized liquid, or a dry powder from a suitable device. For transmucosal or transdermal administration, penetrants appropriate to the barrier to be permeated are used in the formulation. Such penetrants are generally known in the art, and include, for example, for transmucosal administration, detergents, bile salts, and fusidic acid derivatives. Transmucosal administration can be accomplished through the use of nasal sprays or suppositories. For transdermal administration, the active reagents are formulated into ointments, salves, gels, or creams, as generally known in the art. The reagents can also be prepared in the form of suppositories (e.g., with conventional suppository bases such as cocoa butter and other glycerides) or retention enemas for rectal delivery.

[0259] In some embodiments, an aptamer, and/or an aptamer construct is prepared with a carrier that will protect against rapid elimination from the body. For example, a controlled release formulation can be used, including implants and microencapsulated delivery systems. Biodegradable, biocompatible polymers can be used, such as ethylene vinyl acetate, polyanhydrides, polyglycolic acid, collagen, polyorthoesters, and polylactic acid. Methods for preparation of such formulations will be apparent to those skilled in the art. The materials can also be obtained commercially from Alza Corporation and Nova Pharmaceuticals, Inc.

[0260] Liposomal suspensions (including liposomes targeted to infected cells with monoclonal antibodies to viral antigens) can also be used as pharmaceutically acceptable carriers. These can be prepared according to methods known to those skilled in the art, for example, as described in U.S. Pat. No. 4,522,811.

[0261] Additionally, suspensions of an aptamer, and/or an aptamer construct may be prepared as appropriate oily injection suspensions. Suitable lipophilic solvents or vehicles include fatty oils, such as sesame oil, or synthetic fatty acid esters, such as ethyl oleate, triglycerides, or liposomes. Non-lipid polycationic amino polymers may also be used for delivery. Optionally, the suspension may also include suitable stabilizers or agents to increase the solubility of the compounds and allow for the preparation of highly concentrated solutions.

[0262] In some cases, it may be especially advantageous to formulate oral or parenteral compositions in dosage unit form for ease of administration and uniformity of dosage. Dosage unit form as used herein refers to physically discrete units suited as unitary dosages for the subject to be treated; each unit containing a predetermined quantity of an aptamer and/or aptamer construct calculated to produce the desired therapeutic effect in association with the required pharmaceutical carrier. The specification for the dosage unit forms of aptamers and/or constructs described herein are dictated by and directly dependent on the characteristics of the particular aptamer and/or aptamer construct and the particular therapeutic effect to be achieved, and the limitations inherent in the art of compounding such an active agent for the treatment of individuals.

[0263] Pharmaceutical compositions comprising at least one aptamer, and/or aptamer construct can include one or more pharmaceutical excipients. Examples of such excipients include, but are not limited to, binding agents, filling agents, lubricating agents, suspending agents, sweeteners, flavoring agents, preservatives, buffers, wetting agents, disintegrants, effervescent agents, and other excipients. Such excipients are known in the art. Exemplary excipients include: (1) binding agents which include various celluloses and cross-linked polyvinylpyrrolidone, microcrystalline cellulose, such as Avicel® PH101 and Avicel® PH102, silicified microcrystalline cellulose (ProSolv SMCC™), gum tragacanth and gelatin; (2) filling agents such as various starches, lactose, lactose monohydrate, and lactose anhydrous; (3) disintegrating agents such as alginic acid, Primogel, corn starch, lightly crosslinked polyvinyl pyrrolidone, potato starch, maize starch, and modified starches, croscarmellose sodium, cross-povidone, sodium starch glycolate, and mixtures thereof; (4) lubricants, including agents that act on the flowability of a powder to be compressed, and including magnesium stearate, colloidal silicon dioxide, such as Aerosil® 200, talc, stearic acid, calcium stearate, and silica gel; (5) glidants such as colloidal silicon dioxide; (6) preservatives, such as potassium sorbate, methylparaben, propylparaben, benzoic acid and its salts, other esters of parahydroxybenzoic acid such as butylparaben, alcohols such as ethyl or benzyl alcohol, phenolic compounds such as phenol, or quaternary compounds such as benzalkonium chloride; (7) diluents such as pharmaceutically acceptable inert fillers, such as microcrystalline cellulose, lactose, dibasic calcium phosphate, saccharides, and/or mixtures of any of the foregoing; examples of diluents include microcrystalline cellulose, such as Avicel® PH101 and Avicel® PH102; lactose such as lactose monohydrate, lactose anhydrous, and Pharmatose® DCL21; dibasic calcium phosphate such as Emcompress®; mannitol; starch; sorbitol; sucrose; and glucose; (8) sweetening agents, including any natural or artificial sweetener, such as sucrose, saccharin sucrose, xylitol, sodium saccharin, cyclamate, aspartame, and acesulfame; (9) flavoring agents, such as peppermint, methyl salicylate, orange flavoring, Magnasweet® (trademark of MAFCO), bubble gum flavor, fruit flavors, and the like; and (10) effervescent agents, including effervescent couples such as an organic acid and a carbonate or bicarbonate. Suitable organic acids include, for example, citric, tartaric, malic, fumaric, adipic, succinic, and alginic acids and anhydrides and acid salts. Suitable carbonates and bicarbonates include, for example, sodium carbonate, sodium bicarbonate, potassium carbonate, potassium bicarbonate, magnesium carbonate, sodium glycine carbonate, L-lysine carbonate, and arginine carbonate. Alternatively, only the sodium bicarbonate component of the effervescent couple may be present.

[0264] In various embodiments, the formulations described herein are substantially pure. As used herein, “substantially pure” means the active ingredient (e.g., an aptamer, and/or an aptamer construct) is the predominant species present (i.e., on a molar basis it is more abundant than any other individual species in the composition). In some embodiments, a substantially purified fraction is a composition wherein the active ingredient comprises at least about 50 percent (on a molar basis) of all macromolecular species present. Generally, a substantially pure composition will include more than about 80% of all macromolecular species present in the composition. In various embodiments, a substantially pure composition will include at least about 85%, at least about 90%, at least about 95%, or at least about 99% of all macromolecular species present in the composition. In various embodiments, the active ingredient is purified to homogeneity (contaminant species cannot be detected in the composition by conventional detection methods) wherein the composition consists essentially of a single macromolecular species.

### Kits Comprising Aptamers and Aptamer Constructs

[0265] The present disclosure provides kits comprising any of the aptamers, and/or aptamer constructs described herein. Such kits can comprise, for example, (1) at least one aptamer, and/or aptamer constructs; and (2) at least one pharmaceutically acceptable carrier, such as a solvent or solution. Additional kit components can optionally include, for example: (1) any of the pharmaceutically acceptable excipients identified herein, such as stabilizers, buffers, etc., (2) at least one container, vial or similar apparatus for holding and/or mixing the kit components; and (3) delivery apparatus.

### Methods of Treatment

[0266] The present disclosure provides methods of preventing or treating (e.g., alleviating one or more symptoms of) medical conditions through the use of a PDGF aptamer or aptamer construct, a VEGF aptamer or aptamer construct, and/or a VEGF/PDGF aptamer construct. The methods comprise administering a therapeutically effective amount of such aptamers and/or aptamer constructs to a subject in need thereof. The described aptamers can also be used for prophylactic therapy. In some embodiments, the aptamer and/or aptamer construct is administered orally or intravenously.

[0267] The aptamer and/or aptamer construct used in methods of treatment can be: a PDGF aptamer or aptamer construct a VEGF aptamer or aptamer construct, and/or a VEGF/PDGF aptamer construct described herein, or a pharmaceutically acceptable salt thereof, or a prodrug thereof.

[0268] The individual or subject can be any animal (domestic, livestock or wild), including, but not limited to, cats, dogs, horses, pigs and cattle, and preferably humans. As used herein, the terms patient, individual, and subject may be used interchangeably.

[0269] As used herein, “treating” describes the management and care of a patient for the purpose of treating a disease, condition, or disorder and includes the administration of an aptamer, and/or an aptamer construct to prevent the onset of the symptoms or complications of a disease, condition or disorder; to alleviate symptoms or complications of the disease, condition, or disorder; or to eliminate the presence of the disease, condition or disorder in the patient. More specifically, “treating” includes reversing, attenuating, alleviating, minimizing, suppressing or halting at least one deleterious symptom or effect of a disease (disorder) state, disease progression, disease causative agent or other abnormal condition. Treatment is generally continued as long as symptoms and/or pathology ameliorate.

[0270] As used herein, “preventing” means preventing in whole or in part; ameliorating or controlling; reducing, lessening, or decreasing; or retarding or halting.

[0271] In various embodiments, the disclosed compositions and methods are used to treat cardiovascular diseases, cancers, fibrosis, renal diseases or ophthalmic diseases.

[0272] In some embodiments, the disclosed compounds or pharmaceutically acceptable salts thereof, or prodrugs, can be administered in combination with other treatments that improve or eradicate the disease conditions as described above. Compositions including the disclosed aptamers and/or aptamer constructs may contain, for example, more than one aptamer. In some examples, a composition containing one or more aptamers is administered in combination with another useful cardiovascular agent or anticancer agent or antifibrotic agent etc. In general, the currently available dosage forms of the known therapeutic agents for use in such combinations will be suitable.

[0273] “Combination therapy” (or “co-therapy”) includes the administration of an aptamer and/or aptamer construct composition and at least one second agent as part of a specific treatment regimen intended to provide the beneficial effect from the co-action of these therapeutic agents. The beneficial effect of the combination includes, but is not limited to, pharmacokinetic or pharmacodynamic co-action resulting from the combination of therapeutic agents. Administration of these therapeutic agents in combination typically is carried out over a defined time period (usually minutes, hours, days or weeks depending upon the combination selected).

[0274] “Combination therapy” may, but generally is not, intended to encompass the administration of two or more of these therapeutic agents as part of separate monotherapy regimens that incidentally and arbitrarily result in the combinations of the present disclosure. “Combination therapy” is intended to embrace administration of these therapeutic agents in a sequential manner, that is, wherein each therapeutic agent is administered at a different time, as well as administration of these therapeutic agents, or at least two of the therapeutic agents, in a substantially simultaneous manner. Substantially simultaneous administration can be accomplished, for example, by administering to the subject a single dose having a fixed ratio of each therapeutic agent or in multiple, single doses for each of the therapeutic agents.

[0275] The dosage regimen utilizing the aptamers and/or aptamer constructs is selected in accordance with a variety of factors, including, for example, type, species, age, weight, gender and medical condition of the subject; the severity of the condition to be treated; the route of administration; the renal and hepatic function of the subject; and the particular aptamer and/or aptamer constructs or salts thereof employed. An ordinarily skilled physician or veterinarian can readily determine and prescribe the effective amount of the composition required to prevent, counter or arrest the progress of the condition.

[0276] In general, the dosage, i.e., the therapeutically effective amount, ranges from about 1 μg to about 100 mg/kg body weight of the subject being treated, per day.

### Examples

[0277] The following examples are provided for illustrative purposes only and are not intended to limit the scope of the invention as defined by the appended claims. All examples described herein were carried out using standard techniques, which are well known and routine to those of skill in the art. Routine molecular biology techniques described in the following examples can be carried out as described in standard laboratory manuals, such as Sambrook et al. (2001) Molecular Cloning: A Laboratory Manual, 3rd. ed., Cold Spring Harbor Laboratory Press, Cold Spring Harbor, N.Y.).

### Example 1

### PDGF Aptamer Selection and Sequences

[0278] Preparation of Candidate Mixtures:

[0279] A candidate mixture of partially randomized ssDNA oligonucleotides was prepared by polymerase extension of a DNA primer annealed to a biotinylated ssDNA template.

[0280] SELEX Conditions:

[0281] Aptamers to the PDGF-BB protein (R&D Systems) were selected by SomaLogic Inc, as described (Gold et al. (2010) PLoS One 5:e15004), from a library containing a 40-nucleotide random region in which Bn-dU was substituted for dT. The forward primer was 5′-CGCCCTCGTCCCATCTC, and the reverse primer was 5′-CGTTCTCGGTTGGTGTTC. The PDGF-BB protein was biotinylated and partitioned on streptavidin MyOne-SA (Dynal) beads. Preferential selection of aptamers with slow dissociation rates was achieved using a kinetic challenge wherein protein-DNA complexes were incubated in the presence of 10 mM dextran sulfate at 37° C. with increased incubation times and decreased protein concentrations in successive rounds. Kinetic challenge was initiated in round 4 of the selection and was continued through the final 8^{th} round with incubation times as follows: 5 minutes round 4, 15 minutes rounds 5-7, 30 minutes round 8.

[0282] Pool Sequencing:

[0283] Oligonucleotide sequences from the 8^{th} round pool were cloned and several clones were sequenced. This led to the identification of a family of related sequences, as exemplified by the 4149-8_{—}1.

[0284] Deep Sequencing of PDGF SELEX Pool:

[0285] To evaluate more completely the sequences within the 4149-8_{—}1 aptamer family, the 8^{th} round pool was sequenced using 454 pyrosequencing technology. The pool DNA was amplified with 454 primers and the PCR product was purified and normalized using a Sequal normalization plate (Invitrogen, Cat# A10510-01). The eluate was run on a gel to confirm the size and purity of each amplicon. The purified PCR product was sequenced at the 454 pyrosequencing facility at the University of Colorado Health Science Center in Aurora Colo.

[0286] The 454 sequences were aligned with 4149-8_{—}1 by CLUSTAL analysis. The sequence data set from the pool contained 10,803 full length sequences (i.e., those sequences containing both primer sequences) of which 3,839 were unique. These 3,839 unique sequences were searched for the motif “5′-ZACNCGCGZZZAZAGCG” (identity=0.65) and then “ZZ” (identity=1.0) upstream from this. There were 436 sequences found that contained both of these motifs. In addition, 58 other sequences contained only the first pattern but with a generally low identity and with no evident hairpin structure upstream. The 436 sequences were then aligned as follows, (1) with respect to “ZZ”, (2) with respect to the center of the loop, and (3) with respect to “ZACNCGCGZZZAZAGCG”. For all the sequences, the percentage identity at each position with 4149-8_{—}1 was calculated as listed in FIG. 3A. Tables 1 and 2 lists a number of sequences representative of the 4149-8_{—}1 aptamer family of sequences.

[0287] Aptamer Synthesis:

[0288] The modified deoxyuridine-5-carboxamide amidite reagents used for solid-phase synthesis were prepared by: condensation of 5′-O-(4,4′-dimethoxytrityl)-5-trifluoroethoxycarbonyl-2′-deoxyuridine (Nomura et al. (1997) Nucl. Acids Res. 25:2784) with the appropriate primary amine (RNH₂, 1.2 eq; Et₃N, 3 eq.; acetonitrile; 60° C.; 4 h); 3′-O-phophitidylation with 2-cyanoethyl-N,N-diisopropylchlorophosphoramidite (1.2 eq.; iPr₂EtN, 3 eq.; CH₂Cl₂; −10 to 0° C.; 4 h); and purification by flash chromatography on neutral silica gel (Still, et al. (1978) J. Org. Chem. 43:2923). Aptamers were prepared by solid phase synthesis using the phosphoramidite method (Beaucage and Caruthers (1981) Tetrahedron Lett. 22:1859) with some adjustments to the protocol to account for the unique base modifications described herein. Detritylation was accomplished with 10% dichloroacetic acid in toluene for 45 seconds; coupling was achieved with 0.1 M phosphoramidites in 1:1 acetonitrile:dichloromethane activated by 5-benzylmercaptotetrazole and allowed to react 3 times for 5 minutes; capping and oxidation were performed according to instrument vendor recommendations. Deprotection was effected with 1:1:2, t-butylamine:methanol:water (Mullah 1998), reacted for 24 hours at 37 degrees centigrade. Aptamers were synthesized at 200 nmol scale and purified from a polyacrylamide gel using UV shadowing as described (Fitzwater and Polisky (1996) Methods Enzymol. 267:275) with Costar Spin-X (not including siliconized glass wool or spun polypropylene prefilter) and Amicon YM3 concentration per manufacturer's recommendations.

[0289] Modified Nucleotide Structure Activity Relationship and Affinity Maturation:

[0290] To examine the contribution of each of the eight benzyl side chains to binding, we performed another series of systematic point substitutions by chemically synthesizing 5-position variants with a custom-made library of modified dU phosphoramidites. For this purpose, we designed a library to allow us to probe the microenvironment of each of the positions by varying the size, polarity, disposition of H-bond donors and acceptors, linker length, and orientation of the 5-position substituents. In choosing the functional groups for this analysis, we aimed to include variations on a theme of the original modification (in this case, the benzyl group), amino acid side chains overrepresented in complementarity determining regions (CDRs) of antibodies (like tryptophan and tyrosine) (Mian, I S, et al. (1991) J. Mol. Biol. 217:133; Ramaraj T. et al. (2012) Biochim. Biophys. Acta. 1824:520), and “privileged” fragments of small-molecule drugs (Welsch et al. (2010) Curr. Opin. Chem. Biol. 14:347). In a sense, we endeavored to combine elements of affinity maturation in antibodies and structure-activity relationship (SAR) optimization in medicinal chemistry. Although we utilized a single modified nucleotide during SELEX, post-SELEX optimization is constrained only by the synthetic accessibility of the modified monomers and compatibility with solid-phase synthesis.

[0291] The effect of individual substitutions of the benzyl group with fourteen alternative moieties at the 5-position is summarized in FIGS. 1C and D, and FIG. 6B, with relative affinities expressed as dissociation constant ratios and relative PDGF Rβ phosphorylation expressed as percent phospho-PDGF Rβ ratios. Substitution with dT, which only has a methyl group at the 5-position, represents the most drastic change, and in that sense is comparable to alanine scanning mutagenesis in proteins (Cunningham, B. C. et al. (1989) Science 243:1330). Not surprisingly, this was the least tolerated substitution at six of the eight modified nucleotide positions. The exceptions were nucleotides 1 and 7, where this substitution was well-tolerated. These two positions also tolerated many other substitutions, with some replacements yielding up to 5-fold improvement in binding affinity (FIG. 6B). In contrast, nucleotides 8, 17 and 18 exhibited the highest sensitivity to changes. The best single substitutions were then combined, yielding additional variants including 4149-8_{—}255 and 4149-8_{—}260 (FIG. 6B). Aptamer 4149-8_{—}260, which combined phenethyl-dU (Pe-dU) at nucleotide 17 and thiophene-dU (Th-dU) at nucleotide 18, showed excellent binding to both PDGF-BB and PDGF-AB (FIG. 6B). It is worth noting that the affinity of the originally selected SOMAmer was already so high (K_{d}=20 pM) that it approached the detection limit of the binding assay, so it is possible that the degree of affinity improvement is underestimated. We have applied similar post-SELEX optimization strategies to other SOMAmers with weaker initial binding (e.g., K_{d} values ranging from 100 pM to >10 nM), and have observed affinity improvements of up to 100-fold.

[0292] Homodimers of PDGF Aptamer 4149-8_{—}260 (SL5):

[0293] Since PDGF forms a covalently linked homodimer, and two SOMAmers bind to each PDGF homodimer, we determined the effect on binding of homodimerized SOMAmers. The affinity of the PDGF aptamer homodimers could be substantially improved compared to the affinity of the corresponding monomers, due to avidity effects. The crystal structure showed that the 5′ ends of the SOMAmer were 38 Å apart, while the 3′ ends were 74 Å apart. Connecting the 5′ to 3′ end would require at least 63 Å since the shortest path between the two points bisected the protein. Two types of homodimers were ordered, based on readily available chemistry. These were 1) head-to-tail homodimers connected by two to six Heg linkers, which provide ˜20 Å distance per Heg, and 2) 3′-3′ homodimers connected via a synthetic doubler support, combined with one to three Hegs. The homodimers of 4149-8_{—}260 were tested in the PDGF-BB Zorbax binding assay. The binding assay was performed with limiting amount of SOMAmer, and would not distinguish binding of one SOMAmer per protein dimer versus binding of two SOMAmers per protein dimer. The structure of the homodimers is shown in Table 1 (sequences 4149-8_{—}334 through 4149-8_{—}342). The K_{d} values obtained in the Zorbax assay suggested that in the 5′ to 3′ configuration, a longer linker was desirable, and gave up to 10-fold improvement in binding affinity, as shown in Table 1a. In the 3′-3′ linked homodimers, the shorter linker actually appeared to perform better than the longer linker. This was corroborated by cellular phosphorylation results, see Table 1a.

[0294] Based on these sequences, an exemplary consensus sequence is:

(SEQ ID NO: 502)
5′-ZZVCLₙGV′ZACNMGCGZZZAZAGCG-3′,

wherein
V is selected from an A, C or G;
V′ is selected from a C, G or Z, wherein V′ is complementary to V;
N is independently selected from any naturally occurring or modified nucleotide;
M is selected from a C or A;
Z is independently selected from a modified pyrimidine; L is a spacer selected from any naturally occurring or modified nucleotide, a hydrocarbon linker, a polyethylene glycol linker or a combination thereof; and
n is 0 to 20;
wherein one or more nucleotide insertions are optionally included.

[0295] Sequence Truncation Studies:

[0296] Systematic truncation from the 5′ and 3′ ends of 4149-8_{—}1 was performed to define a minimum length required to retain full binding activity of the aptamer to human PDGF-BB, as shown in Table 3. K_{d} values for a subset of the truncations are shown. Z=Benzyl-deoxyuridine (Bn-dU); A, C, G and T are deoxyribonucleotides.

### Protein Expression and Purification, and Aptamer Complex Formation

[0297] For crystallography studies, recombinant human PDGF-BB protein was purchased from Creative BioMart (Shirley, N.Y.). The recombinant protein was expressed in E. coli cells. Aptamer solutions were thawed and then annealed by heating to ˜95° C. for 5 minutes, then incubating at 40° C. for 5 minutes, then cooling to room temperature. The annealed aptamer solution was mixed with protein at a 1.1:1 ratio of DNA to protein. The complex was diluted 5-fold in buffer containing 20 mM Na/K phosphate (pH 7) and 100 mM NaCl. The resulting mixture was concentrated to ˜4 mg/mL in protein in a 1.5 mL Amicon centrifugal filter. Final concentration was estimated from the final volume of retentate.

### Example 2

### Crystallization and Structure of PDGF-Aptamer Complex

[0298] Crystals were grown using the sitting drop vapor diffusion method in Compact, Jr. plates (Emerald BioSystems, WA) set up at 16° C. Crystals for data collection were obtained from a primary screen (ProPlex, Molecular Dimensions). The crystal for the PDGF-BB:4149-8_{—}255 complex was grown from 100 mM magnesium acetate, 100 mM sodium acetate (pH 4.5) and 8% (w/v) PEG 8000. The crystal for the PDGF-BB:4149-8_{—}260 complex was grown from 100 mM magnesium acetate, 100 mM sodium cacodylate (pH 6.5) and 15% (w/v) PEG 6000. Crystals were harvested with Litho Loops and cryoprotected by quick transfer to reservoir solution containing 33% (v/v) ethylene glycol before flash-cooling by plunging directly into liquid nitrogen.

[0299] Data Collection and Structure Determination:

[0300] Data for both structures were collected at beamline 19-ID of the Advanced Photon Source (Argonne, Ill.). The data sets were processed using XDS (Kabsch 2010). The structure of the PDGF-BB:4149-8_{—}260 complex was initially phased by molecular replacement using Phaser from the CCP4 software suite (CCP4, 1994) with the protein model of PDGF from the structure of the PDGF-BB:Beta-type PDGF receptor complex (PDB entry 3MJG) as the search model. Molecular replacement located a single protein monomer per asymmetric unit. Inspection of the electron density maps following an initial round of restrained refinement in REFMAC showed features consistent with nucleic acid adjacent to the protein model. The model of the aptamer was subsequently built through a process of “bootstrapping”, i.e., partial models were subjected to iterative rounds of refinement; resulting in marginally improved maps which allowed further model building. First, phosphate ions were built in nucleic acid backbone density. Secondly, phosphates were replaced by dT residues. Following refinement, modified residues could be discerned by protrusions of positive difference electron density. Identification of the modified residues facilitated determination of the sequence register of the aptamer, and in the final steps dT residues were replaced with the correct nucleobases. All manual building was performed using the Crystallographic Object-Oriented Toolkit (Coot) (Emsley & Cowtan, 2004). The structure of the PDGF-BB:4149-8_{—}255 structure was solved by molecular replacement using the finished model of the 4149-8_{—}260 complex.

[0301] In each structure, a protuberance of electron density was observed contiguous with the electron density of the Oγ atom of residues Thr88 and Thr90. Although 0-mannosylation has been reported at these sites for recombinant PDGF-B expressed in yeast (Settineri, et al., (1990)) there is little reason to expect similar post-translational modifications in the PDGF-B expressed in E. coli. As the observed electron density suggested less than full occupancy, the threonine residues were modeled without any post-translational modification.

[0302] Table 4 discloses data-collection statistics and refinement and model statistics of two aptamer ligands with 4149-8_{—}260 (SEQ ID. NO. 211) and 4149-8_{—}255 (SEQ ID. NO. 207) respectively.

[0303] Table 5 illustrates base-pair parameters for the PDGF BB aptamer compared to B-form DNA. The PDGF BB aptamer adopts deviated B-form conformations in the 5′ stem loop domain and in both stems of the miniknot. Where appropriate, mean values and standard deviations (in parenthesis) are given. Aptamer values are based on analysis using web3DNA (Zheng et al. (2009) Nucleic. Acids Res. 37:W240) and B-DNA values (as found in high resolution crystal structures) were determined using 3DNA as described and reported in Olson, et al. (2001) J. Mol. Biol. 313(1): 229.

[0304] The monomeric subunits of PDGF-BB form twisted β-sheets that dimerize in an anti-parallel orientation characteristic of the cystine knot family of proteins (Oefner et al. (1992) EMBO J. 11:3921). SL5 (4149-8_{—}260) binds two homologous sites at either end of the long axis, crossing the homodimer interface and contacting each of the three PDGF loops (FIG. 7A). The SOMAmer is composed of two domains connected by a network of hydrophobic aromatic interactions (FIG. 7B). At the 5′ end, a short stem is capped with a Heg loop (disordered in the crystal structure), while the remainder of the molecule folds into an extraordinarily small H-type pseudoknot (Aalberts, D. P. et al. (2005) Nucleic Acids Res. 33:2210), with modified nucleotides clustering at the stem loop/pseudoknot junction. Remarkably, all eight modified nucleotides are in contact with PDGF. Seven modified nucleotides cluster together along a hydrophobic groove on the protein, while Bn-dU1 adopts an extended conformation, following a channel at the PDGF homodimer interface. Two natural nucleotides also contact PDGF, with the remaining natural nucleotides contributing to internal structure (FIG. 2 and FIG. 7). The secondary structure elements of SL5, a stem-loop and a pseudoknot, are well-known nucleic acid structural motifs. However, replacement of certain conventional bases with modified nucleotides offers novel functional groups for alternative interactions. This distinguishing feature of SL5 results in an extensive hydrophobic surface for protein binding as well as unique intramolecular contacts between canonical and modified nucleotides.

[0305] Although the 3′ end of SL5 exhibits hallmark characteristics of an H-type pseudoknot (Staple, D. W. et al. (2005) PLoS Biol. 3:e213), this categorization understates the unconventional nature of this signature “miniknot” motif. Compared to the smallest structurally reported H-type pseudoknot which requires 21 nucleotides (Nonin-Lecomte S. et al. (2006) Nucleic Acids Res. 34:1847), the SL5 miniknot consists of a mere 16 nucleotides (FIG. 7B). Furthermore, deletion of the terminal mG24:dC12 base pair of stem 2 (S2) results in undiminished binding affinity (FIG. 3), demonstrating the functional integrity of a 14-nucleotide miniknot. With unprecedented backbone twists and stacking interactions, the miniknot represents a novel pseudoknot variant in which unusually small size is attained via stabilization contributed by packing of the hydrophobic moieties of the modified nucleotides.

[0306] Miniknot stem 1 (S1) formally consists of just two Watson-Crick base pairs (FIG. 8A), while loop 2 (L2) is composed nominally of 5 bases, Pe-dU17, Th-dU18, dA19, Bn-dU20 and mA21. While interactions between L2 and S1 are a defining feature of pseudoknots, they are typically limited to H-bonding. In contrast, the SOMAmer miniknot makes atypical loop-to-stem stacking interactions, supported by unconventional base pairing. In particular, S1 is stabilized by stacking with a non-canonical Bn-dU17:Bn-dU20 base pair derived from L2 (FIG. 8C and FIG. 8B), effectively creating a three base-pair S1 with a novel backbone discontinuity. In contrast to previously described U:U imino carbonyl base pairs, the Pe-dU17:Bn-dU20 base pair utilizes a single H-bond between N3 of Bn-dU17 and the carbonyl oxygen in the amide linker of Bn-dU20 (FIG. 8D). The syn conformation about the glycosyl bond of Bn-dU20 impedes H-bonding with Bn-dU17, but allows Bn20 to stack with Bn-dU8 base without steric clashing with the sugar of Bn-dU8. The unconventional Pe-dU17:Bn-dU20 base pair is made possible by a 280° turn in the backbone between nucleotides 18 and 20 (FIG. 8C). This dramatic strand reversal allows Bn-dU20 base to stack with the sugar of dA9 and form a hydrogen bond with Pe-dU17. Importantly, the Pe-dU17:Bn-dU20 base pair derives additional stabilization through hydrophobic interactions conferred by the modified nucleotides; the ethylene (linker) portion of the Pe-dU17 side chain is directed toward Bn16 (CH::π) while its benzyl group is stacked in π-π edge-to-face interactions with Bn2 and Th18 (FIG. 8E). One additional interaction between L2 and S1 is a base triple (mA21:dG15:dC10; FIG. 8F), a recurrent motif in pseudoknots (Chen, G. et al. (2009) Proc. Natl. Acad. Sci. USA 106:12706). This is the only long-range tertiary interaction in SL5 that does not involve the modified nucleotides.

[0307] Loop 1 (L1) consists of a single extruded nucleotide, mA11 that allows the backbone to make a tight 94° turn, with the intrastrand phosphate distance between mA11 and dC12 compressing to just 5.9 Å (FIG. 8G). H-type pseudoknots often have one or two nucleotides in L1, which typically form hydrogen bonds with S2 and stack into the helical junction (Nonin-Lecomte, S. et al. (2006) Nucleic Acids Res. 34:1847; Michiels, P. J. et al. (2001) J. Mol. Biol. 310:1109). The extruded L1 nucleotide is necessary to keep the structure condensed so that the 5′ stem domain can interface with the miniknot through the hydrophobic moieties of the modified nucleotides. As expected, the extruded base is not conserved (FIG. 3) and can be replaced with a single C3 spacer (FIG. 6A), however, its deletion abrogates binding, presumably due to interference with the miniknot formation.

[0308] The Watson-Crick base pairs of miniknot S1 (dA9:Bn-dU16, dC10:dG15) assemble by the favored H-type pseudoknot arrangement in which strand one of S2 leads directly into strand two of S1, providing efficient stacking of the stems (Klein, D. J. et al. (2009) Nat. Struct. Mol. Biol. 16:343). The three base pairs of S2 are composed entirely of Watson-Crick interactions and form a slightly undertwisted B-form helix (FIG. 8H). This understwisting results in helical parameters that more closely resemble A-form helices, as expected for pseudoknot topology; however, the relevance of these calculations is equivocal, given the short length of the helices in this structure. S2 does not form a conventional coaxial stack with S1 due to severe helical overwinding at the junction (twist angle of 70°) formed by dC10:dG15 of S1 and dC14:dG22 of S2. Continuous stacking of the stems is nevertheless maintained as dC14 stacks with dG15, and dG22 stacks with mA21 from the base triple (FIG. 8H). The extensive helical twist at this junction is necessary to allow mA21 to bridge the major groove of S2 while broadening the minor groove for base triple formation. This configuration is typical in pseudoknots with one or two nucleotides in L1 (Nonin-Lecomte, S. et al. (2006) Nucleic Acids Res. 34:1847; Michiels, P. J. et al. (2001) J. Mol. Biol. 310:1109).

[0309] The SL5 5′ stem is composed of two Watson-Crick base pairs (mA3:Bn-dU7 and dC4:dG6) and a non-canonical Bn-dU2:Bn-dU8 base pair at the base of the stem (FIG. 8I). The Bn-dU2:Bn-dU8 base pair contains two hydrogen bonds, a typical 4-carbonyl-N3 and a unique 4-carbonyl from Bn-dU2 base to amide linker of Bn-dU8 bond (FIG. 8J). Analysis of related sequences in the affinity-enriched pool shows that the length and base composition of the 5′ stem can change, with the notable exception of the invariant Bn-dU:Bn-dU brace at the base of the stem (FIGS. 3A and B), highlighting the importance of this non-canonical base pair in the overall structure and function of SL5. Stability of the 5′ stem helix is further bolstered by stacking of dU8, Bn20 and Pro82 of PDGF (FIG. 9H). The 5′ stem-loop and miniknot domains of SL5 converge where the backbone makes a sharp 111° bend. Significant twist angles and radial displacement of the base pairs in the 5′ stem results in bases 2-4 and 6-7 having greater stacking overlap (because of helix undertwisting) than in conventional B-form helices, while Bn-dU8 base is shifted out and Bn-dU7 base stacks with the amide linker of Bn-dU8 (FIG. 8I). This atypical helix facilitates critical interactions with the rest of SL5 and with PDGF; Bn-dU8 base stacks with Bn20 while Bn8 lies perpendicularly between the rings of Bn16 and Bn20 in consecutive π-π edge-to-face interactions. These long-range tertiary interaction define a precise hinge between the miniknot and the stem-loop domains (FIGS. 8L and 8K). The lack of curvature between the first two nucleotides prevents clashing of Bn-dU1 base with Bn2, augmenting stacking of the rings (FIG. 8I). Bn2 sits in the middle of a hydrophobic cluster created by Bn7 and Bn8 (from the 5′ stem) and Bn16, Pe17 and Bn20 (from the miniknot) (FIG. 7B, FIG. 8I and FIG. 8K). This hydrophobic cluster contributes to stabilization of the SOMAmer, supported by the observation that SL5 exhibits a Tₘ of 64° C., which is >30° C. higher than its analog that lacks the modified nucleotides.

[0310] In addition to SL5, we also solved the structure of SL4 (4149-8_{—}255), which is identical to SL5 except for the replacement of Bn-dU8 with isobutyl-dU (iB-dU). When iB-dU8 was combined with Pe-dU17 and Th-dU18 in variant SL4, the SOMAmer showed substantially weaker binding (˜20-50-fold vs. SL5) and a 75-fold lower in vitro inhibitory activity (FIG. 1A, FIG. 1B and FIG. 6B). The smaller non-aromatic isobutyl side chain cannot form the energetically favorable π-π edge-to-face stacking seen with the benzyl side chains of Bn-dU20, Bn-dU8 and Bn-dU16 in SL5 (FIG. 8M and FIG. 8N). This creates a hole in the center of the hydrophobic cluster at the protein interface, effectively unlocking the hinge between the 5′ stem and the miniknot domains. The structural effect of this substitution is directly analogous to a Phe to Leu mutation in the hydrophobic core of a protein. Such protein mutations are well-described (Kadonosono, T. et al. (2003) Biochemistry 42:10651; Lin, H. J. et al. (2003) Biochim. Biophys. Acta. 1649:16; Baase, W. A. et al. (2010) Protein Sci. 19:631) and usually have a significant destabilizing effect. Junctions between secondary structure motifs are known to play a critical role in determining nucleic acid tertiary structure (Pyle, A. M. et al. (2011) Curr. Opin. Struct. Biol. 21:293).

[0311] Despite markedly weaker target-binding affinity, SL4 exhibits similar thermal melting profile to SL5 in the absence of ligand (Tₘ values of 62° C. and 64° C., respectively). This is consistent with the notion that the cavity and altered junction topology created by iB-dU8 substitution in SL4 destabilizes the protein-binding interface, while leaving the intradomain structures of the SOMAmer intact. The conformations of free SOMAmers in solution may well be very different from those in the complex with the protein, which could also diminish the relationship between Tₘ and binding affinity. In fact, since the energetic cost of solvating a large hydrophobic surface of the SOMAmer is likely to be substantial, we expect the uncomplexed SOMAmer to collapse around the hydrophobic side chains and adopt a conformation in which the hydrophobic side chains are partially protected from the solvent.

[0312] In contrast to previously described protein:aptamer complexes, hydrophobic interactions dominate the interface between SL5 and PDGF (FIG. 2, FIG. 4 and FIG. 9). Binding to PDGF-BB creates a buried surface area of ˜1225 Å² per SOMAmer. The eight modified nucleotides of SL5 create an extensive hydrophobic interface that interacts with 13 non-polar amino acids of PDGF (Ala35, Phe37, Leu38, Val39, Trp40, Pro42, Cys52, Cys53, Ile75, Ile77, Pro82, Ile83, and Phe84), which account for approximately half of the total non-polar contacts, with the remainder comprising aliphatic regions of polar or charged amino acids such as Glu24, Arg27, Asn36, Asn54, Asn55, Arg56, Arg73, Lys74, Lys80, Lys85, and Lys86 (FIG. 9). Similar interactions between completely non-polar residues and non-polar moeities of charged amino acids are often observed in proteins. Thus, the structural diversity afforded by the modified nucleotides in SOMAmers enables them to mimic the rich repertoire of interactions accessible to proteins. The striking difference in the extent of hydrophobic contacts made by the SOMAmer compared to traditional aptamers is evident when the interface atoms are displayed on the surfaces of the target proteins. SL5 exhibits remarkably few polar interactions, having just six H-bonds and one charge-charge interaction with PDGF (FIG. 4), despite close proximity to basic amino acids. Relative to the contact surface area, this is significantly lower than what is typical for aptamers. The total number of H-bonds and charge-charge interactions (that is, polar contacts) for six traditional aptamers increases approximately linearly in direct proportion to the interface area (FIG. 10A, FIG. 22A) with a correlation coefficient of 0.91 and an average of 1.9±0.4 polar contacts per 100 Å² interface area. SL5, as well as two additional SOMAmers in other co-crystal structures, clearly fall outside of the 99% confidence intervals of this trend, with less than half the number of polar contacts per interface area (average of 0.7±0.2 per 100 Å² interface area), while exhibiting a trend toward higher binding affinities for their targets (FIG. 22C). In terms of ligand efficiency (free energy of binding per non-hydrogen contact atom) (Kuntz, I. D. et al. (1999) Proc. Natl. Acad. Sci. USA 96:9997), aptamers and SOMAmers do not appear to be different (FIG. 22C), encompassing a range of values observed with protein-based and small molecule-based ligands (Wells, J. A. et al. (2007) Nature 450:1001). Free energies of binding per interface area are also similar (FIG. 22C). What is different, however, is the value of free energy of binding per polar contact, which is about twice as large for SOMAmers than for aptamers (FIGS. 22 B and C), consistent with the notion that SOMAmers derive a larger contribution to binding from hydrophobic interactions.

[0313] Charge-charge interactions often contribute less than 0.2 kcal/mol to the stability of a folded protein (Sali, D. et al. (1991) J. Mol. Biol. 220:779. In contrast, burying just a single methylene group is estimated to contribute ˜1-1.5 kcal/mol to globular protein stability and/or binding interactions (Kellis, J. T., Jr. et al. (1988) Nature 333:784; Pace, C. N. et al. (2011) Mol. Biol. 408:514). SOMAmer structures reveal a strong reliance on hydrophobic interactions and in this sense, their binding to proteins more closely resemble typical protein-protein interactions. Consistent with this observation, the affinity of SL5 for PDGF shows virtually no decrease across a broad range of salt concentrations (0.1 to 1.0 M NaCl) or pH values (5.0 to 8.8), in contrast to the effects seen with traditional aptamers (Ahmad, K. M. et al. (2011) PLoS ONE 6:e27051; Tang, Q. et al. (2007) J. Colloid. Interface. Sci. 315:99).

[0314] Post-SELEX optimization facilitates fine tuning of shape complementary and hydrophobic packing interactions. For example, the exceptional shape complementary of Pe-dU17 and Th-dU18 at the protein interface (FIG. 10B) is corroborated with the structure-activity relationships (FIG. 6B). Bn-dU1 also forms a unique interaction with PDGF-BB, with the benzyl ring sitting in a tunnel formed by the Cys43-Cys52 disulfide bond and a salt bridge between Glu24 of PDGF chain1 and Arg56 of chain 2 (FIG. 10C). The crystal structure suggests that the binding pocket can accommodate a variety of side chains, including larger bicyclic substituents, thereby enhancing this point of contact with the protein. Indeed, we have identified several modified nucleotide substitutions at this position that confer 5- to 10-fold enhancement in binding affinity (FIG. 6B).

[0315] A notable feature of the PDGF-BB:SL5 structure is the degree to which the SOMAmer mimics PDGFRβ. The receptor binds to PDGF primarily through hydrophobic interactions, including seven hydrophobic amino acids at the PDGF interface (Shim, A. H. et al. (2010) Proc. Natl. Acad. Sci. USA 107:11307). SL5 binding site largely overlaps that of the receptor with the Bn-dU aromatic rings occupying the same hydrophobic groove on the protein (FIG. 11). PDGF contacts both the receptor and SL5 with 24 residues, of which 10 are shared. These shared or “promiscuous” residues likely represent a hot spot of binding energy on the surface of PDGF (Wells, J. A. et al. (2007) Nature 450:1001; Clackson, T. et al. (1994) Science 267:383. However, compared with PDGF Rβ, SL5 exhibits a 10-fold higher affinity for PDGF-BB (Lokker, N. A. et al. (1997) J. Biol. Chem. 272: 33037). Consistent with these observations, SL5 is a potent inhibitor of PDGF-BB (FIG. 1B and FIG. 6B).

### Example 3

### Binding Affinity Assays

[0316] For determination of target binding affinity, SOMAmers were 5′ end-labeled using T4 polynucleotide kinase (New England Biolabs) and γ-³²P-ATP (Perkin Elmer). Binding assays were performed by incubating radiolabeled SOMAmer (˜20,000 c.p.m) at a concentration of ˜0.03-0.05 nM and target protein at concentrations ranging from 10⁻⁷ to 10⁻¹² M in 1XSB18T buffer (40 mM HEPES, pH 7.5; 120 mM NaCl; 5 mM KCl; 5 mM MgCl₂ and 0.01% TWEEN-20) at 37° C. for 30 minutes. Bound complexes were mixed with Zorbax resin and captured on Durapore filter plates. The fraction of SOMAmer bound was quantified with a PhosphorImager (FUJI FLA-3000). Raw binding data were corrected for nonspecific background binding of radiolabeled SOMAmer to Zorbax resin. Equilibrium dissociation constants (K_{d}) was determined as previously described (Jellinek et al. (1993) Proc. Natl. Acad. Sci. 91:11227). Competitor tRNA at a concentration of 200 nM was included in isoform specificity studies as indicated in FIG. 5. To determine the salt dependence on the PDGF-BB/SOMAmer and E10030 interactions, binding affinity assays were performed and analyzed as described above in the presence of 40 mM Hepes pH 7.5, 0.01% TWEEN-20 and either 100 mM, 250 mM, 500 mM, 750 mM or 1.0 M NaCl). The log-log plots of the salt concentrations versus the dissociation constants were fit using simple linear regression. The slope of the plots represents the number of counter-ions released from the DNA upon protein binding, as described by the counter-ion condensation theory of (Manning, G. S. (1969) J. Chem. Phys. 51:924). The affinity of aptamer 4149-8_{—}260 (SEQ ID NO. 211) for PDGF showed little change across a broad range of salt concentrations (0.1 to 1.0 M NaCl) or pH values (5.0 to 8.8), in contrast to the effects seen with traditional aptamers (Ahmad, K. M. et al. (2011) PLoS One 6:e27051; Tang, Q. et al. (2007) J. Colloid. Interface Sci. 315: 99).

### Example 4

### PDGF-BB Cellular Phosphorylation Assay

[0317] PDGF-BB Activity. For testing the ability of PDGF-BB SOMAmers to inhibit PDGF Rβ activation, Hs27 human foreskin fibroblast cells (American Type Culture Collection) were seeded at 5000 cells/well into a 96-well plate, and serum-starved for 24 hours. SOMAmers (varying concentrations as indicated in the figures) were incubated with PDGF-BB (20 ng/mL) (Creative BioMart) in serum-free media for 30 minutes at 37° C., then the complex was added to serum-starved Hs27 cells. At five minutes post stimulation, the supernatant was discarded and the cells were lysed in Lysis Buffer #9 (R&D Systems: 1% NP-40 Alternative, 20 mM Tris (pH 8.0), 137 mM NaCl, 10% glycerol, 2 mM EDTA, 1 mM activated sodium orthovanadate, 10 μg/mL Aprotinin, and 10 μg/mL Leupeptin) on ice for 5 minutes. Elisa detection of phospho-PDGF Rβ was performed using the DuoSet Phospho-PDGF Rβ kit (R&D Systems) according to the manufacturer's instructions. The percent phospho-PDGF Rβ was measured at OD₄₅₀, corrected for plate absorbance and background signal with a no stimulant control. Experiments were generally performed in duplicate or triplicate. Data were plotted in GraphPad Prism 3.0 and fit to a one site competition curve using nonlinear regression. Representative plot of the IC₅₀ determination is shown in FIG. 13 for SOMAmers 4149-8_{—}379 and 5′ amino-linker modified SOMAmer 4149-8_{—}379, with IC₅₀ values of 1.6 nM and 1.7 nM, respectively.

[0318] For activity screening of variants of clone 4149-8, percent inhibition of PDGF-BB-induced PDGF Rβ phosphorylation in Hs27 fibroblasts, under the same conditions as described above but at a single concentration of SOMAmer variants (generally 20 nM), was evaluated.

### Example 5

### Additional PDGF Ligands Based on Nap-dU Modification

[0319] To identify additional aptamers that bind to PDGF-BB with high affinity, we have performed another SELEX experiment with a library comprising Nap-dU modified nucleotides. The selections were performed in a manner substantionally analogous to the one described in Example 1 above and resulted in the identification of the Nap-dU aptamer clone 5169-4.

[0320] Deep Sequencing of PDGF Nap-dU SELEX Pool:

[0321] To evaluate more completely the sequences within the 5169-4_{—}1 aptamer family, the 7^{th} round pool was sequenced using 454 pyrosequencing technology. The pool DNA was amplified with 454 primers and the PCR product was purified and normalized using a Sequal normalization plate (Invitrogen, Cat# A10510-01). The eluate was run on a gel to confirm the size and purity of each amplicon. The purified PCR product was sequenced at the 454 pyrosequencing facility at the University of Colorado Health Sciences Center in Aurora, Colo.

[0322] The sequence data set from the pool contained 8,273 full length sequences (i.e., those sequences containing both primer sequences) of which 1,629 were unique. These 1,629 unique sequences were used to find statistically significant n-mer patterns by counting all possible n-mers in the sequence set, from 4-mers to 30-mers. By comparing the counts for each identified n-mer to counts expected at random for n-mers from a pool of the same composition, statistically significant patterns were found. Two major patterns were identified in the sequence set and 5169-4_{—}1 was found aligned within the second pattern defined by the conserved sequence motif “APGPAPGCACAPCP” found in 11 sequences. A search through all unique sequences for this motif (identity=0.75) found 51 sequences that were then aligned by the motif. For all the sequences, the fractional identity at each position in the alignment was calculated as listed in FIG. 14, with the consensus sequence indicated.

[0323] Sequence Truncation Studies:

[0324] Systematic truncation from the 5′ and 3′ ends of the 50-nucleotide 5169-4 clone was performed to define a minimum length required to retain full binding activity of the aptamer to human PDGF-BB, as shown in Table 6. K_{d} values for these truncations are shown (P=Napthyl-deoxyuridine (Nap-dU); A, C, G and T are deoxyribonucleotides). The 5169-4 clone proved highly amenable to truncation and a 21-nucleotide sequence was identified (5169-4_{—}26) that bound to PDGF-BB with improved binding affinity compared to the 50-mer (17 pM and 29 pM, respectively). The 5169-4_{—}26 21-mer contained 5 Nap-dU modified nucleotides versus 9 Nap-dU modified nucleotides in the 50-mer.

[0325] C3 Spacer Single Substitutions in 5169-4_{—}26 (21-mer):

[0326] The first round of post-SELEX modifications of the Nap-dU PDGF-BB aptamer included a C3 spacer walk at all positions in the 21-mer 5169-4_{—}26. The C3 spacer walk is meant to identify bases not required for high affinity binding that could potentially be removed altogether, replaced with the C3 spacer or other linkers such as hexaethylene glycol (Heg) or polyethylene glycol (PEG) linkers. The results for the C3 spacer substitutions are shown in Table 7. In this table, “P” denotes Nap-dU, “C3” denotes C3 spacer; A, C and G denote deoxyribonucleotides, and “NB” denotes no binding up to 100 nM PDGF-BB. Three sites tolerated C3 substitution with a modest decrease in binding affinity: C1, G6 and C7 (numbering refers to the 21-mer, as shown below). One position, C15, tolerated a C3 spacer substitution with no affect on the binding affinity, compared to 5169-4_{—}26.

[0327] 2′-O-methyl Single Substitutions in 5169-4_{—}26 (21-mer):

[0328] 2′O-methyl substitutions were made at all natural bases in order to identify positions that could tolerate this nuclease-resistant substitution. With the 2′O-methyl Nap phosphoramidite synthesized in our laboratories (Nap-mU), we also evaluated the Nap-dU positions that would tolerate Nap-mU single substitutions. In addition, deoxythymidine (T) was substituted for Nap-dU to assess the importance of each Nap-dU. The binding affinity results are shown in Table 8, and demonstrate that all positions tolerated 2′O-methyl substitutions to varying degrees. The affect of 2′O-methyl substitutions at each deoxycytidine position (C) resulted in no change in the binding affinity, compared to 5169-4_{—}26, up to a 2-fold decrease in binding affinity. The four deoxyguanosine positions (G) showed varying results when substituted with 2′O-methyl from 2.5-fold increased binding affinity at G14, to 5.5-fold decreased binding affinity at G10, compared to 5169-4_{—}26. The 2′O-methyl substitutions at the six deoxyadenosine positions (A) had from zero to greater than 50-fold adverse affect on the binding affinity. The deoxyadenosines towards the 5′ end of the aptamer (A3, A5 and A8) were the three most sensitive to 2′O-methyl substitution. Only the Nap-dU at position 21 completely tolerated Nap-mU substitution with no affect on the binding affinity while the Nap-mU substitution at position 11 showed a 2.5-fold decrease in binding affinity, compared to 5169-4_{—}26. The remaining Nap-mU substitutions resulted in a 15- to 30-fold decrease in binding affinity. The only substitutions that completed eliminated binding (at PDGF-BB concentrations up to 100 nM) were the deoxythymidine substitutions at positions 12 and 21, with the remaining deoxythymidine substitutions having a significant negative affect (>400 fold) on the binding affinity. In Table 8, P=5-naphthalene modified dU, a superscript 1 indicates a 2′-O-methyl modified nucleoside. A, C, G, and T represent the naturally occurring deoxyribonucleotides and “NB” denotes no binding up to 100 nM PDGF-BB.

[0329] Multiple 2′-O-methyl Substitutions in 5169-4_{—}26 (21-mer).

[0330] The combined effects of 2′-O-methyl substitutions in 5169-4_{—}26 lead to the identification of several variants with improved binding affinity, including variant 5169-4_{—}146. This 21-mer has 11 positions that are nuclease-protected by 2′O-methyl and its binding affinity is at least 20-fold greater than the parent truncate, 5169-4_{—}26 (0.60 pM vs 17 pM, respectively). Many other variants also had significant improvements (approximately 3-fold) in binding affinity with combinations of 3 to 10 2′O-methyls. In Table 9, P=5-naphthalene modified dU, a superscript 1 indicates a 2′-O-methyl modified nucleoside, A, C and G represent the naturally occurring deoxyribonucleotides and “NB” denotes no binding up to 3.2 nM PDGF-BB.

### Example 6

### PDGF Nap-dU Aptamer Activity Assay

[0331] To analyze the inhibitory impact of PDGF Nap-dU aptamers on PDGF Rβ activation cellular phosphorylation inhibition assays were performed as described in Example 4. The four aptamer sequences tested inhibited PDGF Rβ activation with IC₅₀ values as follows: 5169-4_{—}26, IC₅₀=1.6 nM; 5169-4_{—}84, IC₅₀=3.3 nM; 5169-4_{—}85, IC₅₀=7.3 nM; 5169-4_{—}112, IC₅₀=1.0 nM.

### Example 7

### VEGF Aptamer Selection and Sequences

[0332] Preparation of Candidate Mixtures: A candidate mixture of partially randomized ssDNA oligonucleotides was prepared by polymerase extension of a DNA primer annealed to a biotinylated ssDNA template.

[0333] VEGF SELEX Conditions:

[0334] Aptamers to recombinant human VEGF-121 protein (both from R&D Systems) were selected by SomaLogic Inc, as described (Gold et al. (2010) PloS One 5:e15004), from a library containing a 40-nucleotide random region in which Nap-dU was substituted for dT. For VEGF-121, the forward primer was 5′-GCCACACCCTGCCCTC-3′ and the reverse primer was 5′-GAGGACACAGACAGACAC-3′. VEGF-121 protein was biotinylated and partitioned on streptavidin MyOne-SA (Dynal) beads. Preferential selection of aptamers with slow dissociation rates was achieved using a kinetic challenge wherein protein-DNA complexes were incubated in the presence of 10 mM dextran sulfate at 37° C. with increased incubation times and decreased protein concentrations in successive rounds. In the VEGF-121 SELEX, rounds 4 and 5 included a 15 minute kinetic challenge while rounds 6 and 7 (final round) included a 30 minute kinetic challenge.

[0335] The smallest alternatively spliced form of vascular endothelial growth factor, VEGF-121, is a difficult protein target for SELEX. With naturally occurring DNA or RNA libraries, or with nucleic acid libraries modified at the 2′-position of ribose, we have previously failed to obtain even a modest degree of affinity improvement. This is notable for two reasons. First, among members of the cystine knot superfamily, VEGF-121 has the highest structural similarity to PDGF-BB, with a root-mean-square deviation of 1.9 Å for 124 Cα atoms (Muller et al., 1997). Second, the larger and the most prevalent VEGF isoform, VEGF-165, has proved to be a good target for SELEX. For example, pegaptanib (Macugen), the only aptamer-based therapeutic to have received regulatory approval to date (for the treatment of macular degeneration), binds only to VEGF-165 through the heparin-binding exon-7-encoded domain, which is lacking in VEGF-121 (Lee et al., 2005; Ruckman et al., 1998). One difference between VEGF-121, VEGF-165 and PDGF-BB is the overall charge, with pI values of 5.8, 8.5 and 10.1, respectively. This points to the importance of polar interactions in aptamer binding. Successful affinity enrichment for VEGF-121 was ultimately achieved with a SELEX Nap-dU library.

[0336] Identification of VEGF-121 Nap-dU Aptamer Sequences:

[0337] Two highly related high affinity variants that differ at a single position (4867-15 and 4867-31) were identified from a Nap-dU SELEX experiment performed as described above. Clone 4867-31 has been truncated to a 29-mer in a series of deletion experiments (Table 7). It is worth noting that truncation of both high affinity clones (4867-15 and 4867-31) results in the same 29-mer since the single nucleotide difference is outside the 5′ boundary of the minimal sequence. Truncated variants that encompass the shorter sequence with high affinity biding, 29-mer 4867-31_{—}143 (5′-CCGPP CAAGP GCPPG PAGGA PPPAA APGG-3′; where “P” is the single-letter designation for Nap-dU) and its close variants, bind to human VEGF-121, human VEGF-165, mouse VEGF-120 and rat VEGF-164 with comparable affinities, ranging from 0.1-1 nM (Table 10). In this table, “P” denotes Nap-dU; A, C, and G denote the naturally occurring deoxyribonucleotides and “NB” denotes no binding up to 100 nM VEGF.

[0338] C3 Spacer Single Substitutions in 4867-15_{—}2 (50-mer).

[0339] The first round of post-SELEX modifications of the VEGF-121 aptamer was a C3 spacer walk at all positions in the 50mer 4867-15_{—}2 (truncated 50-mer). The C3 spacer walk is meant to identify bases not required for high affinity binding that could potentially be removed altogether, replaced with the C3 spacer or other linkers such as hexaethylene glycol (Heg) or polyethylene glycol (PEG) linkers. The results for the C3 spacer substitutions are shown in Table 11. In this table, “P” denotes Nap-dU, “V” denotes C3 spacer; A, C, and G denote the naturally occurring deoxyribonucleotides and “NB” denotes no binding up to 100 nM VEGF. At least three internal sites tolerated C3 substitution: C17, G26 and G29 (numbering refers to the 50-mer, as shown below).

[0340] 2′-O-methyl Single Substitutions in 4867-31_{—}43 (32-mer).

[0341] 2′O-methyl substitutions were made at natural bases in order to identify positions that could tolerate this nuclease-resistant substitution. In addition, 2′-OMe-uridine (2′-OMeU) was substituted for Nap-dU to assess the importance of each Nap-dU. In addition, C3 spacers were tested at certain internal positions hypothesized to be extruded bases, now in the context of the 32mer. Internal deletions and alternative bases were tested at each of the three positions as well. The binding affinity and cell culture inhibition data for select SOMAmers (single concentration of 20 nM) are shown below. The results are shown in Table 12, and demonstrate that C8 (C17 in Table 11) did not completely tolerate substitution to C3 in the context of the shorter truncate. The other two putative extruded bases (G17 and G20) retain good binding and functional activity as C3 or alternative base substitutions in this context. Internal deletions at those positions were not tolerated. None of the Nap-dU modifications could be replaced with 2′OMe-U in this experiment. Several internal sites tolerated 2′OMe modifications, however. In Table 12, P=5-naphthalene modified dU, and a superscript 1 indicates a 2′-OMe modified nucleoside, V=3 carbon spacer, and an empty box indicates a nucleoside deletion. A, C, G, and U represent the naturally occurring deoxyribonucleotides.

[0342] 2′-O-methyl Nap-dU Substitutions and Multiple 2′-O-methyl Substitutions in 4867-31_{—}143 (29-mer).

[0343] With the 2′O-methyl Nap phosphoramidite synthesized in our laboratories (Nap-mU), we evaluated the Nap-dU positions that would tolerate Nap-mU single substitutions. In addition, we tested combinations of 2′OMe and C3 linker substitutions at each of the natural bases. The binding affinity and cell culture inhibition data for select SOMAmers (single concentration of 20 nM) are shown below. As shown in Table 13 below, most of the Nap-dU residues did not tolerate OMe substitution, but substitution of Nap-mU for Nap-dU at position 22 gave a 10-fold increase in affinity, and excellent inhibitory activity. In this table, superscript “1” denotes 2′-O-methyl substitution, “V” denotes C3 spacer. The 2′-OMe combinations were mostly well-tolerated based on affinity, but certain combinations showed a striking loss of inhibitory activity.

[0344] The combined effects of 2′-O-methyl and C3 substitutions led to the identification of several variants with improved binding affinity, including variant 4867-31_{—}188. This 29-mer has 10 positions that are nuclease-protected by either 2′OMe or C3 and its binding affinity is about 3-fold tighter than the parent truncate, 4867-31_{—}143 (38 pM vs 140 pM, respectively). Variant 4867-31_{—}188 retains comparable cellular inhibition activity relative to the parent SOMAmer. See Table 13.

[0345] The only position that tolerated Nap-mU was nucleotide 22 (using 4867-31_{—}143 truncate as the parent sequence). This Nap-mU substitution was next placed into the background of the best combined 2′OMe SOMAmer, 4867-31_{—}188. In addition, the substitution of the original dG at position 15 with a C3 spacer was compared with 2′-OMe substitution at that position to examine the possibility that nuclease-protected base might add rigidity to the molecule and hence increase binding. The best aggregate result was obtained with variant 4867-31_{—}192, which now has 9 protected positions compared to the parent 29-mer truncated variant 4867-31_{—}143 (see Table 14 below; superscript “1” denotes 2′-O-methyl substitution and “V” denotes C3 spacer).

[0346] Modified Nucleotide Structure Activity Relationship and Affinity Maturation:

[0347] To examine the contribution of each of the ten napthyl side chains to binding, we performed another series of systematic point substitutions by chemically synthesizing 5-position variants with a custom-made library of modified dU phosphoramidites. For this purpose, we designed a library to allow us to probe the microenvironment of each of the positions by varying the size, polarity, disposition of H-bond donors and acceptors, linker length, and orientation of the 5-position substituents. In choosing the functional groups for this analysis, we aimed to include variations on a theme of the original modification (in this case, the napthyl group), amino acid side chains overrepresented in complementarity determining regions (CDRs) of antibodies (like tryptophan and tyrosine) (Mian, I. S. et al. (1991) J. Mol. Biol. 217:133; Ramaraj, T. et al. (2012) Biochim. Biophys. Acta. 1824:520), and “privileged” fragments of small-molecule drugs (17). FIG. 15 shows the results of these substitutions, represented as the ratio of K_{d} values (substituted/unsubstituted). Of the 17 different modification substitutions tested each of the ten Nap-dU positions, only four substitutions (Trp-dU 27, NE-dU 16, MBn-dU 10 and BT-dU 16) had little to no effect of the binding affinity. All other substitutions resulted in weaker binding affinity, to varying degrees.

[0348] Deep Sequencing of VEGF SELEX Pool:

[0349] To evaluate more completely the sequences within the 4149-8_{—}1 aptamer family, the enriched pool was sequenced using 454 pyrosequencing technology. The pool DNA was amplified with 454 primers and the PCR product was purified and normalized using a Sequal normalization plate (Invitrogen, Cat# A10510-01). The eluate was run on a gel to confirm the size and purity of each amplicon. The purified PCR product was sequenced at the 454 pyrosequencing facility at the University of Colorado Health Sciences Center in Aurora, Colo.

[0350] The 454 sequences were aligned with 4867-31 by CLUSTAL analysis. The sequence data set from the pool contained 13,139 full-length sequences (i.e., those sequences containing both primer sequences) of which 2,235 were unique. These 2,235 unique sequences were searched for the motif 5′-CCGPP CAAGP GCPPG PAGGA PPPAA APGG-3′. There were 86 sequences found that contained this motifs. For all the sequences, the percentage identity at each position with 4867-31 was calculated as listed in FIG. 16.

### Example 8

### VEGF Binding Affinity Assays

[0351] For determination of target binding affinity, SOMAmers were 5′ end-labeled using T4 polynucleotide kinase (New England Biolabs) and γ-³²P-ATP (Perkin Elmer). Binding assays were performed by incubating radiolabeled SOMAmer (20,000 c.p.m) at a concentration of ˜0.03-0.05 nM and target protein at concentrations ranging from 10⁻⁷ to 10⁻¹² M in 1XSB18T buffer (40 mM HEPES, pH 7.5; 120 mM NaCl; 5 mM KCl; 5 mM MgCl₂ and 0.01% TWEEN-20) at 37° C. for 30 minutes. Bound complexes were mixed with Zorbax resin and captured on Durapore filter plates. The fraction of SOMAmer bound was quantified with a PhosphorImager (FUJI FLA-3000). Raw binding data were corrected for nonspecific background binding of radiolabeled SOMAmer to Zorbax resin. Equilibrium dissociation constants (K_{d}) was determined as previously described (Jellinek et al. (1993) Proc. Natl. Acad. Sci. 90:11227).

### Example 9

### VEGF Activity Assay

[0352] To analyze the inhibitory impact of VEGF121 SOMAmers on the cellular kinase activity of VEGF-R2 (Vascular Endothelial Growth factor Receptor 2), we used human umbilical vein endothelial cells (HUVECs) (Lonza, ^{#}CC-2519) which expresses endogenously high level of VEGF-R2. HUVEC cells were plated in EGM-2 (Endothelial Cell Growth Medium) supplemented with EGM-2 BulletKit (*CC-3162) containing 2% FBS, growth factors (hEGF, Hydrocortisone, VEGF, HFGF-B, R3-IGF-1), heparin, ascorbic acid and GA-1000 (Gentamicin, Amphotericin-B). When HUVEC cells reached 70 to 80% confluence, they were plated in 24-well plate (10⁵ cells/well) and starved overnight with serum-free medium.

[0353] SOMAmers (a single concentration at 20 nM or a range of concentrations) were added to the cultures with 20 ng/mL (1 nM) of VEGF-121 (R&D System, ^{#}4464-VS) containing 1% BSA at 37° C. for 30 minutes. The cells were washed in PBS two times and stimulated with the pre-incubated VEGF-121/SOMAmers complex for 5 minutes. The treated cells were washed again with PBS two times and added ice-cold lysis buffer (1% NP-40 Alternative, 20 mM Tris (pH8.0), 137 mM NaCl, 10% glycerol, 2 mM EDTA, 1 mM activated sodium orthovanadate, 10 μg/mL Aprotinin and 10 μg/mL leupeptin supplemented with a Halt phosphatase inhibitor (Thermo Scientific, ^{#}78428). The cell lysates were measured for phosphorylation of VEGF-R2 by using Human Phospho-VEGF R2/KDR Kit (R&D, DYC 1766-2).

[0354] In functional activity experiments in vitro, various truncated variants of clone 4867-31 at a screening concentration of 20 nM are capable of essentially completely inhibiting VEGFR2 phosphorylation induced by VEGF-121 or VEGF-165 (1-4 nM) in immortalized or primary human umbilical vein endothelial cells (HUVECs). A representative plot of the IC₅₀ determination is shown in FIG. 17 for VEGF aptamers 4867-31_{—}43 and 4867-31_{—}192, with IC₅₀ values of 2.2 nM and 2.1 nM, respectively.

[0355] For activity screening of variants of clone 4867-31, we have evaluated percent inhibition of VEGF-induced VEGF R2 phosphorylation in HUVECs, under the same conditions as described above but at a single concentration of SOMAmer variants (generally 20 nM).

### Example 10

### Homodimer Constructs of PDGF and VEGF Aptamers

[0356] Both PDGF-BB and VEGF are disulfide linked homodimers that exert their biological effects by dimerizing their tyrosine kinase receptors leading to receptor autophosphorylation and signal transduction. If more than one aptamer can bind to its protein target, as is the case with PDGF-BB aptamer 4149-8_{—}260 (based on the crystal structures), such aptamers can be covalently linked in a multimeric construct in a manner that permits simultaneous binding of individual aptamer subunits to the protein. This can lead to improvement in affinity through avidity effect. Two types of homodimers were synthesized, based on readily available chemistry. These were 1) head-to-tail homodimers connected by zero to six Heg linkers, which provide ˜20 Å distance per Heg, and 2) 3′-3′ homodimers connected via a synthetic doubler support, combined with one to three Hegs on each side (that is, two, four or six Hegs total in the dimer). The homodimers of 4149-8_{—}379, 5169-4_{—}26 and 4867-31_{—}192 were tested in a competition binding assay. For determination of competitor binding affinities, aptamer ligands were 5′ end-labeled using T4 polynucleotide kinase (New England Biolabs) and γ-³²P-ATP (Perkin Elmer). Competition assays were performed by pre-mixing a fixed concentration of radiolabeled ligand (1.0 nM) with varying concentrations of competitor aptamer (10⁻¹¹ to 10⁻⁶ M). The ligand and competitor dilutions were incubated with the target protein (100 pM) in 1XSB18T buffer (40 mM HEPES, pH 7.5; 120 mM NaCl; 5 mM KCl; 5 mM MgCl₂ and 0.01% TWEEN-20) at 37° C. for 60 minutes. Bound complexes were mixed with Zorbax resin and captured on Durapore filter plates. The fraction of ligand bound was quantified with a PhosphorImager (FUJI FLA-3000). Raw binding data were normalized to binding without addition of competitor. Data were plotted in GraphPad Prism 3.0 and fit to a one site competition curve using nonlinear regression to determine the equilibrium dissociation constants for the competitor aptamers (Kᵢ). PDGF Homodimers: The structure of the PDGF homodimers of sequences 4149-8_{—}379 (sequences 4149-8_{—}438 through 4149-8_{—}447) and 5169-4_{—}26 (sequences 5169-4_{—}134 through 5169-4_{—}143) are shown in Table 15. For the 4149-8_{—}379 based homodimers, the Kᵢ values obtained in the competition assay suggested that in the 5′ to 3′ configuration, a longer linker was desirable, since a greater than 10-fold improvement in binding affinity was measured with five Heg linkers compared to no Heg linker (0.25 pM vs 4.2 pM, respectively). In the 3′ to 3′ linked 4149-8_{—}379 homodimers, the longer four and six Heg linkers also performed at least 10-fold better than no linker and approximately 2-fold better than the two Heg linkers. For the 5169-4_{—}26 based homodimers, the Kᵢ values indicated a longer Heg linker was advantageous in the 5′ to 3′ configuration, since the Kᵢ improved from 28 pM for no Heg linker to 3.6 pM for six Heg linkers. There was no difference in the Kᵢ values for five and six Heg linkers in the 5′ to 3′ configuration. In the 3′ to 3′ linked 5169-4_{—}26 based homodimers the same pattern was observed, with the Kᵢ improving as the Heg linker length increased. The six Heg linker showed a 5-fold improvement in the Kᵢ compared to no Heg linker (2.0 pM vs. 11 pM, respectively). In Tables 15 and 16, Z=Benzyl-deoxyuridine (Bn-dU), P=5-naphthalene modified dU (Nap-dU), M=methylenedioxybenzyl-dU (MBn-dU), a superscript 1 indicates a 2′-O-methyl modified nucleoside, no superscript indicates deoxyribonucleotides, “C3” indicates a three carbon linker and “H” indicates a hexaethylene glycol linker.

### Example 11

### PDGF/VEGF Heterodimer Aptamer Constructs

[0357] Heterodimers Based on PDGF Aptamer 4149-8 and VEGF Aptamer 4867-31.

[0358] With the aim of developing constructs with specificity for PDGF and VEGF, we designed and tested a variety of aptamer constructs comprising a VEGF aptamer linked to a PDGF aptamer. The first aptamer constructs tested combined PDGF variant 4149-8_{—}273 and VEGF 4867-31_{—}183. Aptamer constructs were synthesized head-to-tail, connected by zero to three hexaethylene glycol (Heg) linkers, in both orientations (either with the PDGF aptamer at the 5′ end or VEGF aptamer at the 5′ end). The results are shown in Table 17 and 18 below. In Table 17, “Z” denotes Bn-dU, “P” denotes Nap-dU, superscript “1” denotes 2′-O-methyl substitution, no superscript indicates deoxyribonucleotides, “V” denotes C3 spacer and “H” denotes hexaethylene glycol (Heg) linker. In Table 18, percent activity remaining denotes fractional PDGF βR phosphorylation levels in Hs27 fibroblasts in the presence of 20 nM aptamer relative to control (no aptamer).

[0359] Based on binding affinity for PDGF-BB, -AB, VEGF-121, and VEGF-165, aptamer construct 4149-8_{—}320 appeared to give the best results in this experiment. We also tested the aptamer constructs in the PDGF cellular phosphorylation assay, as shown in Table 18. Based on the functional assay data, all aptamer constructs tested inhibited PDGF-BB-induced PDGF βR phosphorylation in Hs27 fibroblasts. Aptamer constructs 4149-8_{—}313, 4149-8_{—}314, 4149-8_{—}315, 4149-8_{—}316, 4149-8_{—}319 and 4149-8_{—}320 inhibited PDGF-BB-induced PDGF βR phosphorylation with IC₅₀ values of <20 nM. Aptamer constructs 4149-8_{—}317 and 4149-8_{—}318 had IC₅₀ values of ˜20 nM.

[0360] We synthesized 4149-8_{—}401, based on the configuration of 4149-8_{—}320 (5′PDGF-3Heg-VEGF3′), comprising PDGF aptamer 4149-8_{—}379 and VEGF aptamer 4867-31_{—}192. See Table 19. In this table, “Z” denotes Bn-dU, “P” denotes Nap-dU, M denotes MBn-dU, superscript “1” denotes 2′-O-methyl substitution, no superscript denotes deoxyribonucleotides, “C3” denotes C3 spacer and “H” denotes hexaethylene glycol (Heg) linker. Aptamer construct 4149-8_{—}401 showed binding affinity for PDGF-BB and VEGF121 that was equivalent or better than the binding affinity of its precursor aptamer construct, 4149-8_{—}320. See Table 20.

[0361] Aptamer constructs 4149-8_{—}320 and 4149-8_{—}401 inhibited PDGF-BB-induced were PDGF-Rβ phosphorylation in Hs27 fibroblasts with IC₅₀ values of about 1 nM and 5 nM, respectively. Further, aptamer construct 4149-8_{—}401 comprising a 5′ amino linker conjugated to either 20 kDa or 40 kDa PEG maintained the ability to inhibit PDGF-BB-induced PDGF-R13 phosphorylation in Hs27 fibroblasts with IC₅₀ values of about 1 nM. Those results are consistent with stoichiometric titration/inhibition of all of the PDGF in the assay (1 nM monomer).

[0362] We tested another set of aptamer constructs comprising aptamers 4149-8_{—}379 and 4867-31_{—}192 to determine the effect of overall linker length and the orientation of the PDGF and VEGF aptamers. See Table 21, below. With VEGF at the 5′ end, we tested one to six Heg linkers. With PDGF at the 5′ end, we tested two to six Heg linkers, including 4149-8_{—}401, which has three Heg linkers. One Heg linker variant was not tested in this orientation because it exhibited somewhat reduced binding in a related variant 4149-8_{—}318. Binding data are shown in Table 16. Most of the aptamer constructs performed well, with the exception of 4149-8_{—}408 and 4149-8_{—}409, which showed somewhat weaker affinity for PDGF-BB. The binding affinity of the Ophthotech aptamer E10030 (Fovista) is included for comparison.

[0363] The ability of the aptamer construct 4149-8_{—}401 to inhibit the activity of both PDGF and VEGF in vitro was tested in the receptor phosphorylation experiments as described above. Aptamer construct 4149-8_{—}401 inhibited PDGF-induced PDGFRβ phosphorylation in Hs27 fibroblasts with comparable potency to that of the PDGF monomer 4149-8_{—}379 (IC₅₀ values of 2.4 nM and 1.7 nM, respectively). Similarly, aptamer construct 4149-8_{—}401 inhibited VEGF-induced VEGFR2 phosphorylation in HUVEC cells with comparable potency to that of the VEGF monomer 4867-31_{—}192 (IC₅₀ values of 0.7 nM and 2.1 nM, respectively). FIG. 18 shows the results of that experiment. FIG. 18A shows (A) inhibition of PDGF-induced PDGF Rβ phosphorylation in Hs27 fibroblasts with PDGF aptamer 4149-8_{—}379 (open circles) and PDGF/VEGF aptamer construct 4149-8_{—}401 (closed circles), and (B) inhibition of VEGF-induced VEGF R2 phosphorylation in HUVECs with VEGF aptamer 4867-31_{—}192 (open circles) and PDGF/VEGF aptamer construct 4149-8_{—}401 (closed circles).

[0364] Heterodimers Based on PDGF Aptamer 5169-4 and VEGF Aptamer 4867-31.

[0365] We have designed and tested additional heterodimer constructs based on the variants of PDGF aptamer 5169-4_{—}26 and VEGF aptamer 4867-31_{—}192. Aptamer constructs were synthesized head-to-tail, connected by one to six hexaethylene glycol (Heg) linkers, in both orientations (either with the PDGF aptamer at the 5′ end or VEGF aptamer at the 5′ end). The results are shown in Table 22. With VEGF at the 5′ end Heg linkers between three and six resulted in the highest affinities. The affinites in general were slightly lower when the VEGF-121 aptamer sequence was on the 3′ end, with most K_{d} values falling in the 100-300 pM range, except for the five Heg linker sequence which had a K_{d} of 56 pM. With PDGF at the 5′ end, the K_{d} values ranged from 11 pM for three Heg linkers to 0.54 pM for four Heg linkers, with the remaining K_{d} values falling in between for all other Heg linker lengths. When PDGF was at the 3′ end there was a trend towards higher binding affinity as the linker length increased, with one Heg linker having a K_{d} of 5.3 pM and six Heg linkers having a K_{d} of 0.20 pM. In Table 22, “P” denotes Nap-dU, superscript “1” denotes 2′-O-methyl substitution, no superscript denotes deoxyribonucleotides and “H” denotes hexaethylene glycol (Heg) linker.

### Example 12

### Simultaneous Binding of PDGF/VEGF Aptamer Constructs to VEGF and PDGF

[0366] To demonstrate the ability of the PDGF/VEGF aptamer constructs to bind VEGF and PDGF simultaneously, a sandwich assay was developed. Briefly, Nunc Maxisorp® plates were coated with either human PDGF-BB or human VEGF-121 (20 ng/mL). After blocking the wells with a 1% BSA solution, PDGF/VEGF aptamer construct was added (10 nM) and allowed to bind to the adsorbed protein target. After washing, the biotinylated complementary protein (2 nM PDGF-BB for VEGF-121 coated plates and 2 nM VEGF-121 or VEGF-165 for PDGF-BB coated plates) was allowed to bind to form a ternary complex. Following another wash, horseradish peroxidase conjugated streptavidin (HRP-SA) was added and allowed to form a quaternary complex. After a final wash, a color forming horse radish peroxidase substrate was added according to the manufacturer's directions (Thermo Scientific TMB substrate kit 34021) and the reaction stopped when appropriate by addition of 1.6 M H₂SO₄. The absorbance per well at 450 nm was determined with the Spectramax M5 plate reader with auto check on. In parallel to the method described above, a set of four control experiments were executed in which one of the 4 components that make up the quaternary complex was excluded.

[0367] As shown in FIG. 19, PDGF/VEGF aptamer construct SL1012 (20 kDa PEG-N-4149-8_{—}401) was able to bind simultaneously to human VEGF-121 and PDGF-BB. A strong signal was observed when all components of the quaternary complex were added (complete) while the absence of any one of the 4 components resulted in background or near background signal. Similar results were obtained with PDGF and VEGF coated plates, indicating that the order of protein addition to the aptamer construct did not matter. As shown in FIG. 19, SL1012 was able to bind simultaneously to human VEGF-165 and PDGF-BB. FIG. 19A shows microtiter plates coated with VEGF with addition of biotinylated PDGF. FIG. 19B shows microtiter plates coated with PDGF with addition of biotinylated VEGF. Data are presented as the mean +95% confidence interval (n=3). A strong signal was observed when all components of the quaternary complex were added (complete) while the exclusion of any of the four components resulted in background or near background signal. The data also demonstrate that the addition of a PEG moiety to the 5′-terminus of the aptamer construct does not preclude simultaneous binding activity.

[0368] Simultaneous binding of human VEGF-165 and human PDGF-BB to (A) SL1012 or and (B) SL1013 (40 kDA PEG-N-4149-8-401) is shown in FIG. 20. Microtiter plates were coated with PDGF with addition of biotinylated VEGF. Complete means addition of all components of the quaternary complex, while each condition without one of the four components is shown in the graphs. Data are presented as the mean +95% confidence interval (n=3)

[0369] A similar experiment was performed with various aptamer constructs that did not contain the PEG moiety. In this experiment, only a no aptamer control was included because the previous results demonstrated the requirement for the other components of the complex to generate signal. As shown in FIG. 21, aptamer constructs 4149-8_{—}317, 4149-8_{—}318, 4149-8_{—}320, 4149-8_{—}401 and 4149-8_{—}414 simultaneously bound to PDGF and VEGF regardless of the order of protein addition. FIG. 21(A) shows microtiter plates coated with VEGF with addition of biotinylated PDGF and FIG. 21(B) shows microtiter plates coated with PDGF with addition of biotinylated PDGF.

Add data on simultaneous binding of heterodimer constructs based on the variants of PDGF aptamer 5169-4 and VEGF aptamer 4867-31.

### Example 13

### Intravitreal Pharmacokinetic Studies

[0370] Initial ocular pharmacokinetic testing was performed to understand how the aptamers and aptamer constructs behave in the eye. Four aptamers and aptamer constructs were tested as shown in Table 23.

[0371] For each aptamer or aptamer construct, a single intravitreal injection was performed into both eyes of five New Zealand White rabbits (10 eyes). Animals received either a 0.5 mg/eye dose (SL1010 and SL1011) or a 1.0 mg/eye dose (SL1012 and SL1013). These doses represent the weight of the aptamer or aptamer construct only (PEG weight was excluded from the calculations). All test articles were formulated in phosphate buffered saline. For each aptamer or aptamer construct test article, vitreous humor samples were collected from both eyes from one animal at 2, 24, 48, 96 or 192 hours post dose. Vitreous humor samples were stored frozen until they were assayed.

[0372] The vitreous humor concentrations of the aptamers or aptamer constructs were determined by ultra performance liquid chromatography (UPLC) assay methods with detection by absorbance at 260 nanometers (nm). Briefly, the vitreous hydrogel was sheered by passing it several times through a 20 gauge needle. Vitreous proteins were precipitated by the addition of 2 volumes of 2-ethoxyethanol. Following centrifugation, the supernatant was recovered and injected onto an Acquity® C18 column (0.2×100 mm). The column temperature was 80° C. and the flow rate was maintained at 0.2 mL/min. Buffer A consisted of TEAA pH 7.0 and 5% acetonitrile. Buffer B consisted of 100% acetonitrile. The program held 50% buffer B for 1 minute following the injection of sample and then buffer B was increased linearly to 70% over 4 minutes. Detection was accomplished by absorbance at 260 nm. Concentrations (free acid equivalent) of aptamer or aptamer construct in the vitreous humor were determined by interpolation of the peak absorbance units of the unknown samples to those obtained by a standard curve prepared with known concentrations of aptamer or aptamer construct.

[0373] The results of that experiment are shown in Table 24.

[0374] An ordinary linear regression fit of the natural logarithm of the vitreous concentration versus time resulted in estimates for the vitreous half-lives of 105, 47, 69 and 92 hours for SL1010, SL1011, SL1012, and SL1013, respectively. Table 25 shows the results, along with the 95% confidence interval.

[0375] These vitreous half-lives compare favorably to the half-lives in NZW rabbits of similar sized therapeutic VEGF inhibitors, such as Macugen (83 hours, Eyetech Study Group (2002) Retina 22:143) and Lucentis (70 hours, Gaudreault et al. (2007) Retina 27:1260). Therefore, these aptamers and aptamer constructs may be useful for the treatment of ocular diseases such as AMD and diabetic retinopathy.

[0376] The foregoing embodiments and examples are intended only as examples. No particular embodiment, example, or element of a particular embodiment or example is to be construed as a critical, required, or essential element or feature of any of the claims. Various alterations, modifications, substitutions, and other variations can be made to the disclosed embodiments without departing from the scope of the present invention, which is defined by the appended claims. The specification, including the figures and examples, is to be regarded in an illustrative manner, rather than a restrictive one, and all such modifications and substitutions are intended to be included within the scope of the invention. Accordingly, the scope of the invention should be determined by the appended claims and their legal equivalents, rather than by the examples given above. For example, steps recited in any of the method or process claims may be executed in any feasible order and are not limited to an order presented in any of the embodiments, the examples, or the claims.

TABLE 1
Sequences Representative of the 4149-8_1
and Truncated Variants with K_{d}
values for PDGF of 10 nM or less

| Aptamer | | SEQ |
|---|---|---|
| ID. No. | Sequence (5′ → 3′) | ID NO. |
| 4149-8_1 | C-G-C-C-C-T-C-G-T-C-C-C-A-T-C-T-C-Bn-Bn-A-C-G-A-C-Bn-A- | 1 |
| | C-G-Bn-Bn-A-C-A-C-G-C-G-Bn-Bn-Bn-A-Bn-A-G-C-G-Bn-C-A- | |
| | A-C-C-C-G-A-G-Bn-G-A-A-C-A-C-C-A-A-C-C-G-A-G-A-A-C-G | |
| 4149-8_2 | A-T-C-T-C-Bn-Bn-A-C-G-A-C-Bn-A-C-G-Bn-Bn-A-C-A-C-G-C- | 2 |
| | G-Bn-Bn-Bn-A-Bn-A-G-C-G-Bn-C-A-A-C-C-C-G-A-G-Bn-G-A- | |
| | A-C-A | |
| 4149-8_4 | A-T-C-T-C-Bn-Bn-A-C-G-A-C-Bn-A-C-G-Bn-Bn-A-C-A-C-G-C- | 3 |
| | G-Bn-Bn-Bn-A-Bn-A-G-C-G-Bn-C-A-A-C-C-C-G-A-G-Bn-G-A-A | |
| 4149-8_5 | A-T-C-T-C-Bn-Bn-A-C-G-A-C-Bn-A-C-G-Bn-Bn-A-C-A-C-G-C- | 4 |
| | G-Bn-Bn-Bn-A-Bn-A-G-C-G-Bn-C-A-A-C-C-C-G-A-G-Bn-G | |
| 4149-8_6 | A-T-C-T-C-Bn-Bn-A-C-G-A-C-Bn-A-C-G-Bn-Bn-A-C-A-C-G-C- | 5 |
| | G-Bn-Bn-Bn-A-Bn-A-G-C-G-Bn-C-A-A-C-C-C-G-A-G | |
| 4149-8_7 | A-T-C-T-C-Bn-Bn-A-C-G-A-C-Bn-A-C-G-Bn-Bn-A-C-A-C-G-C- | 6 |
| | G-Bn-Bn-Bn-A-Bn-A-G-C-G-Bn-C-A-A-C-C-C-G | |
| 4149-8_8 | A-T-C-T-C-Bn-Bn-A-C-G-A-C-Bn-A-C-G-Bn-Bn-A-C-A-C-G-C- | 7 |
| | G-Bn-Bn-Bn-A-Bn-A-G-C-G-Bn-C-A-A-C-C | |
| 4149-8_9 | A-T-C-T-C-Bn-Bn-A-C-G-A-C-Bn-A-C-G-Bn-Bn-A-C-A-C-G-C- | 8 |
| | G-Bn-Bn-Bn-A-Bn-A-G-C-G-Bn-C-A-A | |
| 4149-8_10 | A-T-C-T-C-Bn-Bn-A-C-G-A-C-Bn-A-C-G-Bn-Bn-A-C-A-C-G-C- | 9 |
| | G-Bn-Bn-Bn-A-Bn-A-G-C-G-Bn-C | |
| 4149-8_11 | C-T-C-Bn-Bn-A-C-G-A-C-Bn-A-C-G-Bn-Bn-A-C-A-C-G-C-G-Bn- | 10 |
| | Bn-Bn-A-Bn-A-G-C-G-Bn-C-A-A-C-C-C-G-A-G-Bn-G-A-A-C-A | |
| 4149-8_12 | C-Bn-Bn-A-C-G-A-C-Bn-A-C-G-Bn-Bn-A-C-A-C-G-C-G-Bn-Bn- | 11 |
| | Bn-A-Bn-A-G-C-G-Bn-C-A-A-C-C-C-G-A-G-Bn-G-A-A-C-A | |
| 4149-8_13 | Bn-A-C-G-A-C-Bn-A-C-G-Bn-Bn-A-C-A-C-G-C-G-Bn-Bn-Bn-A- | 12 |
| | Bn-A-G-C-G-Bn-C-A-A-C-C-C-G-A-G-Bn-G-A-A-C-A | |
| 4149-8_20 | C-Bn-Bn-A-C-G-A-C-Bn-A-C-G-Bn-Bn-A-C-A-C-G-C-G-Bn-Bn- | 13 |
| | Bn-A-Bn-A-G-C-G-Bn-C-A-A-C-C-C-G-A-G-Bn-G-A-A-C | |
| 4149-8_21 | C-Bn-Bn-A-C-G-A-C-Bn-A-C-G-Bn-Bn-A-C-A-C-G-C-G-Bn-Bn- | 14 |
| | Bn-A-Bn-A-G-C-G-Bn-C-A-A-C-C-C-G-A-G-Bn-G-A-A | |
| 4149-8_22 | C-Bn-Bn-A-C-G-A-C-Bn-A-C-G-Bn-Bn-A-C-A-C-G-C-G-Bn-Bn- | 15 |
| | Bn-A-Bn-A-G-C-G-Bn-C-A-A-C-C-C-G-A-G-Bn-G-A | |
| 4149-8_23 | C-Bn-Bn-A-C-G-A-C-Bn-A-C-G-Bn-Bn-A-C-A-C-G-C-G-Bn-Bn- | 16 |
| | Bn-A-Bn-A-G-C-G-Bn-C-A-A-C-C-C-G-A-G-Bn-G | |
| 4149-8_24 | C-Bn-Bn-A-C-G-A-C-Bn-A-C-G-Bn-Bn-A-C-A-C-G-C-G-Bn-Bn- | 17 |
| | Bn-A-Bn-A-G-C-G-Bn-C-A-A-C-C-C-G-A-G-T | |
| 4149-8_25 | C-Bn-Bn-A-C-G-A-C-Bn-A-C-G-Bn-Bn-A-C-A-C-G-C-G-Bn-Bn- | 18 |
| | Bn-A-Bn-A-G-C-G-Bn-C-A-A-C-C-C-G-A-G | |
| 4149-8_26 | C-Bn-Bn-A-C-G-A-C-Bn-A-C-G-Bn-Bn-A-C-A-C-G-C-G-Bn-Bn- | 19 |
| | Bn-A-Bn-A-G-C-G-Bn-C-A-A-C-C-C-G-A | |
| 4149-8_27 | C-T-C-Bn-Bn-A-C-G-A-C-Bn-A-C-G-Bn-Bn-A-C-A-C-G-C-G-Bn- | 20 |
| | Bn-Bn-A-Bn-A-G-C-G-Bn-C | |
| 4149-8_28 | C-Bn-Bn-A-C-G-A-C-Bn-A-C-G-Bn-Bn-A-C-A-C-G-C-G-Bn-Bn- | 21 |
| | Bn-A-Bn-A-G-C-G-Bn-C | |
| 4149-8_29 | C-Bn-Bn-A-C-G-A-C-Bn-A-C-G-Bn-Bn-A-C-A-C-G-C-G-Bn-Bn- | 22 |
| | Bn-A-Bn-A-G-C-G-T | |
| 4149-8_30 | C-Bn-Bn-A-C-G-A-C-Bn-A-C-G-Bn-Bn-A-C-A-C-G-C-G-Bn-Bn- | 23 |
| | Bn-A-Bn-A-G-C-G | |
| 4149-8_31 | C-Bn-Bn-A-C-G-A-C-Bn-A-C-G-Bn-Bn-A-C-A-C-G-C-G-Bn-Bn- | 24 |
| | Bn-A-Bn-A-G-C | |
| 4149-8_32 | C-Bn-Bn-A-C-G-A-C-Bn-A-C-G-Bn-Bn-A-C-A-C-G-C-G-Bn-Bn- | 25 |
| | Bn-A-Bn-A-G | |
| 4149-8_36 | Bn-Bn-A-C-G-A-C-Bn-A-C-G-Bn-Bn-A-C-A-C-G-C-G-Bn-Bn- | 26 |
| | Bn-A-Bn-A-G-C-G-Bn-C | |
| 4149-8_37 | Bn-Bn-A-C-G-A-C-Bn-A-C-G-Bn-Bn-A-C-A-C-G-C-G-Bn-Bn- | 27 |
| | Bn-A-Bn-A-G-C-G-T | |
| 4149-8_38 | Bn-Bn-A-C-G-A-C-Bn-A-C-G-Bn-Bn-A-C-A-C-G-C-G-Bn-Bn- | 28 |
| | Bn-A-Bn-A-G-C-G | |
| 4149-8_39 | Bn-Bn-A-C-G-A-C-Bn-A-C-G-Bn-Bn-A-C-A-C-G-C-G-Bn-Bn- | 29 |
| | Bn-A-Bn-A-G-C | |
| 4149-8_40 | Bn-Bn-A-C-G-A-C-Bn-A-C-G-Bn-Bn-A-C-A-C-G-C-G-Bn-Bn- | 30 |
| | Bn-A-Bn-A-G | |
| 4149-8_44 | Bn-Bn-A¹-C-G-A-C-Bn-A-C-G-Bn-Bn-A-C-A-C-G-C-G-Bn-Bn- | 31 |
| | Bn-A-Bn-A-G-C-G | |
| 4149-8_45 | Bn-Bn-A-C¹-G-A-C-Bn-A-C-G-Bn-Bn-A-C-A-C-G-C-G-Bn-Bn- | 32 |
| | Bn-A-Bn-A-G-C-G | |
| 4149-8_46 | Bn-Bn-A-C-G¹-A-C-Bn-A-C-G-Bn-Bn-A-C-A-C-G-C-G-Bn-Bn- | 33 |
| | Bn-A-Bn-A-G-C-G | |
| 4149-8_47 | Bn-Bn-A-C-G-A¹-C-Bn-A-C-G-Bn-Bn-A-C-A-C-G-C-G-Bn-Bn- | 34 |
| | Bn-A-Bn-A-G-C-G | |
| 4149-8_48 | Bn-Bn-A-C-G-A-C¹-Bn-A-C-G-Bn-Bn-A-C-A-C-G-C-G-Bn-Bn- | 35 |
| | Bn-A-Bn-A-G-C-G | |
| 4149-8_49 | Bn-Bn-A-C-G-A-C-Bn-A¹-C-G-Bn-Bn-A-C-A-C-G-C-G-Bn-Bn- | 36 |
| | Bn-A-Bn-A-G-C-G | |
| 4149-8_50 | Bn-Bn-A-C-G-A-C-Bn-A-C¹-G-Bn-Bn-A-C-A-C-G-C-G-Bn-Bn- | 37 |
| | Bn-A-Bn-A-G-C-G | |
| 4149-8_51 | Bn-Bn-A-C-G-A-C-Bn-A-C-G¹-Bn-Bn-A-C-A-C-G-C-G-Bn-Bn- | 38 |
| | Bn-A-Bn-A-G-C-G | |
| 4149-8_52 | Bn-Bn-A-C-G-A-C-Bn-A-C-G-Bn-Bn-A¹-C-A-C-G-C-G-Bn-Bn- | 39 |
| | Bn-A-Bn-A-G-C-G | |
| 4149-8_53 | Bn-Bn-A-C-G-A-C-Bn-A-C-G-Bn-Bn-A-C¹-A-C-G-C-G-Bn-Bn- | 40 |
| | Bn-A-Bn-A-G-C-G | |
| 4149-8_54 | Bn-Bn-A-C-G-A-C-Bn-A-C-G-Bn-Bn-A-C-A¹-C-G-C-G-Bn-Bn- | 41 |
| | Bn-A-Bn-A-G-C-G | |
| 4149-8_55 | Bn-Bn-A-C-G-A-C-Bn-A-C-G-Bn-Bn-A-C-A-C¹-G-C-G-Bn-Bn- | 42 |
| | Bn-A-Bn-A-G-C-G | |
| 4149-8_56 | Bn-Bn-A-C-G-A-C-Bn-A-C-G-Bn-Bn-A-C-A-C-G¹-C-G-Bn-Bn- | 43 |
| | Bn-A-Bn-A-G-C-G | |
| 4149-8_57 | Bn-Bn-A-C-G-A-C-Bn-A-C-G-Bn-Bn-A-C-A-C-G-C¹-G-Bn-Bn- | 44 |
| | Bn-A-Bn-A-G-C-G | |
| 4149-8_58 | Bn-Bn-A-C-G-A-C-Bn-A-C-G-Bn-Bn-A-C-A-C-G-C-G¹-Bn-Bn- | 45 |
| | Bn-A-Bn-A-G-C-G | |
| 4149-8_59 | Bn-Bn-A-C-G-A-C-Bn-A-C-G-Bn-Bn-A-C-A-C-G-C-G-Bn-Bn- | 46 |
| | Bn-A¹-Bn-A-G-C-G | |
| 4149-8_60 | Bn-Bn-A-C-G-A-C-Bn-A-C-G-Bn-Bn-A-C-A-C-G-C-G-Bn-Bn- | 47 |
| | Bn-A-Bn-A¹-G-C-G | |
| 4149-8_61 | Bn-Bn-A-C-G-A-C-Bn-A-C-G-Bn-Bn-A-C-A-C-G-C-G-Bn-Bn- | 48 |
| | Bn-A-Bn-A-G¹-C-G | |
| 4149-8_62 | Bn-Bn-A-C-G-A-C-Bn-A-C-G-Bn-Bn-A-C-A-C-G-C-G-Bn-Bn- | 49 |
| | Bn-A-Bn-A-G-C¹-G | |
| 4149-8_63 | Bn-Bn-A-C-G-A-C-Bn-A-C-G-Bn-Bn-A-C-A-C-G-C-G-Bn-Bn- | 50 |
| | Bn-A-Bn-A-G-C-G¹ | |
| 4149-8_64 | C3-Bn-A-C-G-A-C-Bn-A-C-G-Bn-Bn-A-C-A-C-G-C-G-Bn-Bn-Bn- | 51 |
| | A-Bn-A-G-C-G | |
| 4149-8_67 | Bn-Bn-A-C3-G-A-C-Bn-A-C-G-Bn-Bn-A-C-A-C-G-C-G-Bn-Bn- | 52 |
| | Bn-A-Bn-A-G-C-G | |
| 4149-8_68 | Bn-Bn-A-C-C3-A-C-Bn-A-C-G-Bn-Bn-A-C-A-C-G-C-G-Bn-Bn- | 53 |
| | Bn-A-Bn-A-G-C-G | |
| 4149-8_69 | Bn-Bn-A-C-G-C3-C-Bn-A-C-G-Bn-Bn-A-C-A-C-G-C-G-Bn-Bn- | 54 |
| | Bn-A-Bn-A-G-C-G | |
| 4149-8_70 | Bn-Bn-A-C-G-A-C3-Bn-A-C-G-Bn-Bn-A-C-A-C-G-C-G-Bn-Bn- | 55 |
| | Bn-A-Bn-A-G-C-G | |
| 4149-8_71 | Bn-Bn-A-C-G-A-C-C3-A-C-G-Bn-Bn-A-C-A-C-G-C-G-Bn-Bn-Bn- | 56 |
| | A-Bn-A-G-C-G | |
| 4149-8_72 | Bn-Bn-A-C-G-A-C-Bn-C3-C-G-Bn-Bn-A-C-A-C-G-C-G-Bn-Bn- | 57 |
| | Bn-A-Bn-A-G-C-G | |
| 4149-8_73 | Bn-Bn-A-C-G-A-C-Bn-A-C3-G-Bn-Bn-A-C-A-C-G-C-G-Bn-Bn- | 58 |
| | Bn-A-Bn-A-G-C-G | |
| 4149-8_78 | Bn-Bn-A-C-G-A-C-Bn-A-C-G-Bn-Bn-A-C3-A-C-G-C-G-Bn-Bn- | 59 |
| | Bn-A-Bn-A-G-C-G | |
| 4149-8_79 | Bn-Bn-A-C-G-A-C-Bn-A-C-G-Bn-Bn-A-C-C3-C-G-C-G-Bn-Bn- | 60 |
| | Bn-A-Bn-A-G-C-G | |
| 4149-8_80 | Bn-Bn-A-C-G-A-C-Bn-A-C-G-Bn-Bn-A-C-A-C3-G-C-G-Bn-Bn- | 61 |
| | Bn-A-Bn-A-G-C-G | |
| 4149-8_87 | Bn-Bn-A-C-G-A-C-Bn-A-C-G-Bn-Bn-A-C-A-C-G-C-G-Bn-Bn- | 62 |
| | Bn-C3-Bn-A-G-C-G | |
| 4149-8_91 | Bn-Bn-A-C-G-A-C-Bn-A-C-G-Bn-Bn-A-C-A-C-G-C-G-Bn-Bn- | 63 |
| | Bn-A-Bn-A-G-C3-G | |
| 4149-8_92 | Bn-Bn-A-C-G-A-C-Bn-A-C-G-Bn-Bn-A-C-A-C-G-C-G-Bn-Bn- | 64 |
| | Bn-A-Bn-A-G-C-C3 | |
| 4149-8_93 | Bn-Bn-A¹-C-G-A¹-C-Bn-A¹-C-G-Bn-Bn-A-C-A¹-C-G¹-C-G-Bn-Bn- | 65 |
| | Bn-A¹-Bn-A¹-G¹-C¹-G¹ | |
| 4149-8_94 | Bn-Bn-A¹-C-G-A-C-Bn-A¹-C-G-Bn-Bn-A-C-A¹-C-G-C-G-Bn-Bn- | 66 |
| | Bn-A-Bn-A¹-G-C-G¹ | |
| 4149-8_95 | Bn-Bn-A-C-Heg-G-Bn-Bn-A-C-A-C-G-C-G-Bn-Bn-Bn-A-Bn-A- | 67 |
| | G-C-G | |
| 4149-8_96 | Bn-Bn-A-C-Heg-Heg-G-Bn-Bn-A-C-A-C-G-C-G-Bn-Bn-Bn-A- | 68 |
| | Bn-A-G-C-G | |
| 4149-8_97 | Bn-Bn-A-C-G-Heg-C-G-Bn-Bn-A-C-A-C-G-C-G-Bn-Bn-Bn-A- | 69 |
| | Bn-A-G-C-G | |
| 4149-8_98 | Bn-Bn-A-C-C3-C3-C3-C3-C3-C3-G-Bn-Bn-A-C-A-C-G-C-G-Bn- | 70 |
| | Bn-Bn-A-Bn-A-G-C-G | |
| 4149-8_99 | Bn-Bn-A-C-C3-C3-C3-C3-G-Bn-Bn-A-C-A-C-G-C-G-Bn-Bn-Bn- | 71 |
| | A-Bn-A-G-C-G | |
| 4149-8_100 | Bn-Bn-A-C-C3-C3-G-Bn-Bn-A-C-A-C-G-C-G-Bn-Bn-Bn-A-Bn- | 72 |
| | A-G-C-G | |
| 4149-8_101 | Bn-Bn-A¹-C-G-C3-C-C3-C3-C-G-Bn-Bn-A-C-A¹-C-G¹-C-G-Bn- | 73 |
| | Bn-Bn-A¹-Bn-A¹-G¹-C¹-G¹ | |
| 4149-8_103 | U¹-Bn-A-C-G-A-C-Bn-A-C-G-Bn-Bn-A-C-A-C-G-C-G-Bn-Bn-Bn- | 74 |
| | A-Bn-A-G-C-G | |
| 4149-8_105 | Bn-Bn-A-C-G-A-C-U¹-A-C-G-Bn-Bn-A-C-A-C-G-C-G-Bn-Bn-Bn- | 75 |
| | A-Bn-A-G-C-G | |
| 4149-8_106 | Bn-Bn-A-C-G-A-C-Bn-A-C-G-U¹-Bn-A-C-A-C-G-C-G-Bn-Bn-Bn- | 76 |
| | A-Bn-A-G-C-G | |
| 4149-8_110 | Bn-Bn-A-C-G-A-C-Bn-A-C-G-Bn-Bn-A-C-A-C-G-C-G-Bn-Bn-U¹- | 77 |
| | A-Bn-A-G-C-G | |
| 4149-8_112 | Bn-Nap-A-C-G-A-C-Bn-A-C-G-Bn-Bn-A-C-A-C-G-C-G-Bn-Bn- | 78 |
| | Bn-A-Bn-A-G-C-G | |
| 4149-8_113 | Bn-Bn-A-C-G-A-C-Nap-A-C-G-Bn-Bn-A-C-A-C-G-C-G-Bn-Bn- | 79 |
| | Bn-A-Bn-A-G-C-G | |
| 4149-8_114 | Bn-Bn-A-C-G-A-C-Bn-A-C-G-Nap-Bn-A-C-A-C-G-C-G-Bn-Bn- | 80 |
| | Bn-A-Bn-A-G-C-G | |
| 4149-8_115 | Bn-Bn-A-C-G-A-C-Bn-A-C-G-Bn-Nap-A-C-A-C-G-C-G-Bn-Bn- | 81 |
| | Bn-A-Bn-A-G-C-G | |
| 4149-8_116 | Bn-Bn-A-C-G-A-C-Bn-A-C-G-Bn-Bn-A-C-A-C-G-C-G-Nap-Bn- | 82 |
| | Bn-A-Bn-A-G-C-G | |
| 4149-8_117 | Bn-Bn-A-C-G-A-C-Bn-A-C-G-Bn-Bn-A-C-A-C-G-C-G-Bn-Nap- | 83 |
| | Bn-A-Bn-A-G-C-G | |
| 4149-8_118 | Bn-Bn-A-C-G-A-C-Bn-A-C-G-Bn-Bn-A-C-A-C-G-C-G-Bn-Bn- | 84 |
| | Nap-A-Bn-A-G-C-G | |
| 4149-8_119 | Bn-Bn-A-C-G-A-C-Bn-A-C-G-Bn-Bn-A-C-A-C-G-C-G-Bn-Bn- | 85 |
| | Bn-A-Nap-A-G-C-G | |
| 4149-8_121 | Nap-Bn-A-C-G-A-C-Bn-A-C-G-Bn-Bn-A-C-A-C-G-C-G-Bn-Bn- | 86 |
| | Bn-A-Bn-A-G-C-G | |
| 4149-8_122 | Bn-Bn-A-C-G-A-C-Bn-A-C-G-Bn-Bn-A-C-A-C-G-C-G-Bn-Bn- | 87 |
| | Bn-A-U¹-A-G-C-G | |
| 4149-8_123 | Bn-Bn-A¹-C-Heg-Heg-G-Bn-Bn-A-C-A¹-C-G-C-G-Bn-Bn-Bn-A- | 88 |
| | Bn-A¹-G-C-G¹ | |
| 4149-8_124 | Bn-Bn-A-C-Heg-Heg-G-Bn-Bn-A-C-A-C-G-C-G-Nap-Bn-Bn-A- | 89 |
| | Bn-A-G-C-G | |
| 4149-8_125 | Bn-Bn-A-C-Heg-Heg-G-U¹-Bn-A-C-A-C-G-C-G-Bn-Bn-Bn-A- | 90 |
| | Bn-A-G-C-G | |
| 4149-8_126 | Bn-Bn-A¹-C-Heg-Heg-G-U¹-Bn-A-C-A¹-C-G-C-G-Nap-Bn-Bn-A- | 91 |
| | Bn-A¹-G-C-G¹ | |
| 4149-8_128 | Bn-Nap-A¹-C-Heg-Heg-G-Nap-Nap-A-C-A¹-C-G-C-G-Nap- | 92 |
| | Nap-Bn-A-Nap-A¹-G-C-G¹ | |
| 4149-8_130 | Bn-Bn-A¹-C-Heg-G-Bn-Bn-A-C-A¹-C-G-C-G-Bn-Bn-Bn-A-Bn- | 93 |
| | A¹-G-C-G¹ | |
| 4149-8_131 | Bn-Bn-A-C-Heg-G-Bn-Bn-A-C-A-C-G-C-G-Nap-Bn-Bn-A-Bn-A- | 94 |
| | G-C-G | |
| 4149-8_132 | Bn-Bn-A-C-Heg-G-U¹-Bn-A-C-A-C-G-C-G-Bn-Bn-Bn-A-Bn-A- | 95 |
| | G-C-G | |
| 4149-8_133 | Bn-Bn-A¹-C-Heg-G-U¹-Bn-A-C-A¹-C-G-C-G-Nap-Bn-Bn-A-Bn- | 96 |
| | A¹-G-C-G¹ | |
| 4149-8_135 | Pe-Bn-A¹-C-Heg-G-Bn-Bn-A-C-A¹-C-G-C-G-Bn-Bn-Bn-A-Bn-A¹- | 97 |
| | G-C-G¹ | |
| 4149-8_136 | Bn-Pe-A¹-C-Heg-G-Bn-Bn-A-C-A¹-C-G-C-G-Bn-Bn-Bn-A-Bn-A¹- | 98 |
| | G-C-G¹ | |
| 4149-8_137 | Bn-Bn-A¹-C-Heg-G-Pe-Bn-A-C-A¹-C-G-C-G-Bn-Bn-Bn-A-Bn-A¹- | 99 |
| | G-C-G¹ | |
| 4149-8_138 | Bn-Bn-A¹-C-Heg-G-Bn-Pe-A-C-A¹-C-G-C-G-Bn-Bn-Bn-A-Bn-A¹- | 100 |
| | G-C-G¹ | |
| 4149-8_139 | Bn-Bn-A¹-C-Heg-G-Bn-Bn-A-C-A¹-C-G-C-G-Pe-Bn-Bn-A-Bn-A¹- | 101 |
| | G-C-G¹ | |
| 4149-8_140 | Bn-Bn-A¹-C-Heg-G-Bn-Bn-A-C-A¹-C-G-C-G-Bn-Pe-Bn-A-Bn-A¹- | 102 |
| | G-C-G¹ | |
| 4149-8_141 | Bn-Bn-A¹-C-Heg-G-Bn-Bn-A-C-A¹-C-G-C-G-Bn-Bn-Pe-A-Bn-A¹- | 103 |
| | G-C-G¹ | |
| 4149-8_142 | Bn-Bn-A¹-C-Heg-G-Bn-Bn-A-C-A¹-C-G-C-G-Bn-Bn-Bn-A-Pe-A¹- | 104 |
| | G-C-G¹ | |
| 4149-8_143 | BT-Bn-A¹-C-Heg-G-Bn-Bn-A-C-A¹-C-G-C-G-Bn-Bn-Bn-A-Bn-A¹- | 105 |
| | G-C-G¹ | |
| 4149-8_144 | Bn-BT-A¹-C-Heg-G-Bn-Bn-A-C-A¹-C-G-C-G-Bn-Bn-Bn-A-Bn-A¹- | 106 |
| | G-C-G¹ | |
| 4149-8_145 | Bn-Bn-A¹-C-Heg-G-BT-Bn-A-C-A¹-C-G-C-G-Bn-Bn-Bn-A-Bn-A¹- | 107 |
| | G-C-G¹ | |
| 4149-8_146 | Bn-Bn-A¹-C-Heg-G-Bn-BT-A-C-A¹-C-G-C-G-Bn-Bn-Bn-A-Bn-A¹- | 108 |
| | G-C-G¹ | |
| 4149-8_147 | Bn-Bn-A¹-C-Heg-G-Bn-Bn-A-C-A¹-C-G-C-G-BT-Bn-Bn-A-Bn-A¹- | 109 |
| | G-C-G¹ | |
| 4149-8_148 | Bn-Bn-A¹-C-Heg-G-Bn-Bn-A-C-A¹-C-G-C-G-Bn-BT-Bn-A-Bn-A¹- | 110 |
| | G-C-G¹ | |
| 4149-8_149 | Bn-Bn-A¹-C-Heg-G-Bn-Bn-A-C-A¹-C-G-C-G-Bn-Bn-BT-A-Bn-A¹- | 111 |
| | G-C-G¹ | |
| 4149-8_150 | Bn-Bn-A¹-C-Heg-G-Bn-Bn-A-C-A¹-C-G-C-G-Bn-Bn-Bn-A-BT-A¹- | 112 |
| | G-C-G¹ | |
| 4149-8_151 | Th-Bn-A¹-C-Heg-G-Bn-Bn-A-C-A¹-C-G-C-G-Bn-Bn-Bn-A-Bn-A¹- | 113 |
| | G-C-G¹ | |
| 4149-8_152 | Bn-Th-A¹-C-Heg-G-Bn-Bn-A-C-A¹-C-G-C-G-Bn-Bn-Bn-A-Bn-A¹- | 114 |
| | G-C-G¹ | |
| 4149-8_153 | Bn-Bn-A¹-C-Heg-G-Th-Bn-A-C-A¹-C-G-C-G-Bn-Bn-Bn-A-Bn-A¹- | 115 |
| | G-C-G¹ | |
| 4149-8_154 | Bn-Bn-A¹-C-Heg-G-Bn-Th-A-C-A¹-C-G-C-G-Bn-Bn-Bn-A-Bn-A¹- | 116 |
| | G-C-G¹ | |
| 4149-8_155 | Bn-Bn-A¹-C-Heg-G-Bn-Bn-A-C-A¹-C-G-C-G-Th-Bn-Bn-A-Bn-A¹- | 117 |
| | G-C-G¹ | |
| 4149-8_156 | Bn-Bn-A¹-C-Heg-G-Bn-Bn-A-C-A¹-C-G-C-G-Bn-Th-Bn-A-Bn-A¹- | 118 |
| | G-C-G¹ | |
| 4149-8_157 | Bn-Bn-A¹-C-Heg-G-Bn-Bn-A-C-A¹-C-G-C-G-Bn-Bn-Th-A-Bn-A¹- | 119 |
| | G-C-G¹ | |
| 4149-8_158 | Bn-Bn-A¹-C-Heg-G-Bn-Bn-A-C-A¹-C-G-C-G-Bn-Bn-Bn-A-Th-A¹- | 120 |
| | G-C-G¹ | |
| 4149-8_159 | Nap-Bn-A¹-C-Heg-G-Bn-Bn-A-C-A¹-C-G-C-G-Bn-Bn-Bn-A-Bn- | 121 |
| | A¹-G-C-G¹ | |
| 4149-8_160 | Bn-Nap-A¹-C-Heg-G-Bn-Bn-A-C-A¹-C-G-C-G-Bn-Bn-Bn-A-Bn- | 122 |
| | A¹-G-C-G¹ | |
| 4149-8_161 | Bn-Bn-A¹-C-Heg-G-Nap-Bn-A-C-A¹-C-G-C-G-Bn-Bn-Bn-A-Bn- | 123 |
| | A¹-G-C-G¹ | |
| 4149-8_162 | Bn-Bn-A¹-C-Heg-G-Bn-Nap-A-C-A¹-C-G-C-G-Bn-Bn-Bn-A-Bn- | 124 |
| | A¹-G-C-G¹ | |
| 4149-8_163 | Bn-Bn-A¹-C-Heg-G-Bn-Bn-A-C-A¹-C-G-C-G-Nap-Bn-Bn-A-Bn- | 125 |
| | A¹-G-C-G¹ | |
| 4149-8_164 | Bn-Bn-A¹-C-Heg-G-Bn-Bn-A-C-A¹-C-G-C-G-Bn-Nap-Bn-A-Bn- | 126 |
| | A¹-G-C-G¹ | |
| 4149-8_165 | Bn-Bn-A¹-C-Heg-G-Bn-Bn-A-C-A¹-C-G-C-G-Bn-Bn-Nap-A-Bn- | 127 |
| | A¹-G-C-G¹ | |
| 4149-8_166 | Bn-Bn-A¹-C-Heg-G-Bn-Bn-A-C-A¹-C-G-C-G-Bn-Bn-Bn-A-Nap- | 128 |
| | A¹-G-C-G¹ | |
| 4149-8_167 | Ib-Bn-A¹-C-Heg-G-Bn-Bn-A-C-A¹-C-G-C-G-Bn-Bn-Bn-A-Bn-A¹- | 129 |
| | G-C-G¹ | |
| 4149-8_168 | Bn-Ib-A¹-C-Heg-G-Bn-Bn-A-C-A¹-C-G-C-G-Bn-Bn-Bn-A-Bn-A¹- | 130 |
| | G-C-G¹ | |
| 4149-8_169 | Bn-Bn-A¹-C-Heg-G-Ib-Bn-A-C-A¹-C-G-C-G-Bn-Bn-Bn-A-Bn-A¹- | 131 |
| | G-C-G¹ | |
| 4149-8_170 | Bn-Bn-A¹-C-Heg-G-Bn-Ib-A-C-A¹-C-G-C-G-Bn-Bn-Bn-A-Bn-A¹- | 132 |
| | G-C-G¹ | |
| 4149-8_171 | Bn-Bn-A¹-C-Heg-G-Bn-Bn-A-C-A¹-C-G-C-G-Ib-Bn-Bn-A-Bn-A¹- | 133 |
| | G-C-G¹ | |
| 4149-8_172 | Bn-Bn-A¹-C-Heg-G-Bn-Bn-A-C-A¹-C-G-C-G-Bn-Ib-Bn-A-Bn-A¹- | 134 |
| | G-C-G¹ | |
| 4149-8_173 | Bn-Bn-A¹-C-Heg-G-Bn-Bn-A-C-A¹-C-G-C-G-Bn-Bn-Ib-A-Bn-A¹- | 135 |
| | G-C-G¹ | |
| 4149-8_174 | Bn-Bn-A¹-C-Heg-G-Bn-Bn-A-C-A¹-C-G-C-G-Bn-Bn-Bn-A-Ib-A¹- | 136 |
| | G-C-G¹ | |
| 4149-8_175 | Trp-Bn-A¹-C-Heg-G-Bn-Bn-A-C-A¹-C-G-C-G-Bn-Bn-Bn-A-Bn- | 137 |
| | A¹-G-C-G¹ | |
| 4149-8_176 | Bn-Trp-A¹-C-Heg-G-Bn-Bn-A-C-A¹-C-G-C-G-Bn-Bn-Bn-A-Bn- | 138 |
| | A¹-G-C-G¹ | |
| 4149-8_177 | Bn-Bn-A¹-C-Heg-G-Trp-Bn-A-C-A¹-C-G-C-G-Bn-Bn-Bn-A-Bn- | 139 |
| | A¹-G-C-G¹ | |
| 4149-8_181 | Bn-Bn-A¹-C-Heg-G-Bn-Bn-A-C-A¹-C-G-C-G-Bn-Bn-Trp-A-Bn- | 140 |
| | A¹-G-C-G¹ | |
| 4149-8_182 | Bn-Bn-A¹-C-Heg-G-Bn-Bn-A-C-A¹-C-G-C-G-Bn-Bn-Bn-A-Trp- | 141 |
| | A¹-G-C-G¹ | |
| 4149-8_183 | 2Nap-Bn-A¹-C-Heg-G-Bn-Bn-A-C-A¹-C-G-C-G-Bn-Bn-Bn-A-Bn- | 142 |
| | A¹-G-C-G¹ | |
| 4149-8_184 | Bn-2Nap-A¹-C-Heg-G-Bn-Bn-A-C-A¹-C-G-C-G-Bn-Bn-Bn-A-Bn- | 143 |
| | A¹-G-C-G¹ | |
| 4149-8_185 | Bn-Bn-A¹-C-Heg-G-2Nap-Bn-A-C-A¹-C-G-C-G-Bn-Bn-Bn-A-Bn- | 144 |
| | A¹-G-C-G¹ | |
| 4149-8_187 | Bn-Bn-A¹-C-Heg-G-Bn-Bn-A-C-A¹-C-G-C-G-2Nap-Bn-Bn-A-Bn- | 145 |
| | A¹-G-C-G¹ | |
| 4149-8_188 | Bn-Bn-A¹-C-Heg-G-Bn-Bn-A-C-A¹-C-G-C-G-Bn-2Nap-Bn-A-Bn- | 146 |
| | A¹-G-C-G¹ | |
| 4149-8_189 | Bn-Bn-A¹-C-Heg-G-Bn-Bn-A-C-A¹-C-G-C-G-Bn-Bn-2Nap-A-Bn- | 147 |
| | A¹-G-C-G¹ | |
| 4149-8_190 | Bn-Bn-A¹-C-Heg-G-Bn-Bn-A-C-A¹-C-G-C-G-Bn-Bn-Bn-A-2Nap- | 148 |
| | A¹-G-C-G¹ | |
| 4149-8_191 | 2NE-Bn-A¹-C-Heg-G-Bn-Bn-A-C-A¹-C-G-C-G-Bn-Bn-Bn-A-Bn- | 149 |
| | A¹-G-C-G¹ | |
| 4149-8_192 | Bn-2NE-A¹-C-Heg-G-Bn-Bn-A-C-A¹-C-G-C-G-Bn-Bn-Bn-A-Bn- | 150 |
| | A¹-G-C-G¹ | |
| 4149-8_193 | Bn-Bn-A¹-C-Heg-G-2NE-Bn-A-C-A¹-C-G-C-G-Bn-Bn-Bn-A-Bn- | 151 |
| | A¹-G-C-G¹ | |
| 4149-8_194 | Bn-Bn-A¹-C-Heg-G-Bn-2NE-A-C-A¹-C-G-C-G-Bn-Bn-Bn-A-Bn- | 152 |
| | A¹-G-C-G¹ | |
| 4149-8_195 | Bn-Bn-A¹-C-Heg-G-Bn-Bn-A-C-A¹-C-G-C-G-2NE-Bn-Bn-A-Bn- | 153 |
| | A¹-G-C-G¹ | |
| 4149-8_197 | Bn-Bn-A¹-C-Heg-G-Bn-Bn-A-C-A¹-C-G-C-G-Bn-Bn-2NE-A-Bn- | 154 |
| | A¹-G-C-G¹ | |
| 4149-8_198 | Bn-Bn-A¹-C-Heg-G-Bn-Bn-A-C-A¹-C-G-C-G-Bn-Bn-Bn-A-2NE- | 155 |
| | A¹-G-C-G¹ | |
| 4149-8_199 | NE-Bn-A¹-C-Heg-G-Bn-Bn-A-C-A¹-C-G-C-G-Bn-Bn-Bn-A-Bn- | 156 |
| | A¹-G-C-G¹ | |
| 4149-8_200 | Bn-NE-A¹-C-Heg-G-Bn-Bn-A-C-A¹-C-G-C-G-Bn-Bn-Bn-A-Bn- | 157 |
| | A¹-G-C-G¹ | |
| 4149-8_201 | Bn-Bn-A¹-C-Heg-G-NE-Bn-A-C-A¹-C-G-C-G-Bn-Bn-Bn-A-Bn- | 158 |
| | A¹-G-C-G¹ | |
| 4149-8_202 | Bn-Bn-A¹-C-Heg-G-Bn-NE-A-C-A¹-C-G-C-G-Bn-Bn-Bn-A-Bn- | 159 |
| | A¹-G-C-G¹ | |
| 4149-8_203 | Bn-Bn-A¹-C-Heg-G-Bn-Bn-A-C-A¹-C-G-C-G-NE-Bn-Bn-A-Bn- | 160 |
| | A¹-G-C-G¹ | |
| 4149-8_204 | Bn-Bn-A¹-C-Heg-G-Bn-Bn-A-C-A¹-C-G-C-G-Bn-NE-Bn-A-Bn- | 161 |
| | A¹-G-C-G¹ | |
| 4149-8_205 | Bn-Bn-A¹-C-Heg-G-Bn-Bn-A-C-A¹-C-G-C-G-Bn-Bn-NE-A-Bn- | 162 |
| | A¹-G-C-G¹ | |
| 4149-8_206 | Bn-Bn-A¹-C-Heg-G-Bn-Bn-A-C-A¹-C-G-C-G-Bn-Bn-Bn-A-NE- | 163 |
| | A¹-G-C-G¹ | |
| 4149-8_207 | MBn-Bn-A¹-C-Heg-G-Bn-Bn-A-C-A¹-C-G-C-G-Bn-Bn-Bn-A-Bn- | 164 |
| | A¹-G-C-G¹ | |
| 4149-8_208 | Bn-MBn-A¹-C-Heg-G-Bn-Bn-A-C-A¹-C-G-C-G-Bn-Bn-Bn-A-Bn- | 165 |
| | A¹-G-C-G¹ | |
| 4149-8_209 | Bn-Bn-A¹-C-Heg-G-MBn-Bn-A-C-A¹-C-G-C-G-Bn-Bn-Bn-A-Bn- | 166 |
| | A¹-G-C-G¹ | |
| 4149-8_210 | Bn-Bn-A¹-C-Heg-G-Bn-MBn-A-C-A¹-C-G-C-G-Bn-Bn-Bn-A-Bn- | 167 |
| | A¹-G-C-G¹ | |
| 4149-8_211 | Bn-Bn-A¹-C-Heg-G-Bn-Bn-A-C-A¹-C-G-C-G-MBn-Bn-Bn-A-Bn- | 168 |
| | A¹-G-C-G¹ | |
| 4149-8_212 | Bn-Bn-A¹-C-Heg-G-Bn-Bn-A-C-A¹-C-G-C-G-Bn-MBn-Bn-A-Bn- | 169 |
| | A¹-G-C-G¹ | |
| 4149-8_213 | Bn-Bn-A¹-C-Heg-G-Bn-Bn-A-C-A¹-C-G-C-G-Bn-Bn-MBn-A-Bn- | 170 |
| | A¹-G-C-G¹ | |
| 4149-8_214 | Bn-Bn-A¹-C-Heg-G-Bn-Bn-A-C-A¹-C-G-C-G-Bn-Bn-Bn-A-MBn- | 171 |
| | A¹-G-C-G¹ | |
| 4149-8_215 | PP-Bn-A¹-C-Heg-G-Bn-Bn-A-C-A¹-C-G-C-G-Bn-Bn-Bn-A-Bn- | 172 |
| | A¹-G-C-G¹ | |
| 4149-8_216 | Bn-PP-A¹-C-Heg-G-Bn-Bn-A-C-A¹-C-G-C-G-Bn-Bn-Bn-A-Bn- | 173 |
| | A¹-G-C-G¹ | |
| 4149-8_217 | Bn-Bn-A¹-C-Heg-G-PP-Bn-A-C-A¹-C-G-C-G-Bn-Bn-Bn-A-Bn- | 174 |
| | A¹-G-C-G¹ | |
| 4149-8_218 | Bn-Bn-A¹-C-Heg-G-Bn-PP-A-C-A¹-C-G-C-G-Bn-Bn-Bn-A-Bn- | 175 |
| | A¹-G-C-G¹ | |
| 4149-8_219 | Bn-Bn-A¹-C-Heg-G-Bn-Bn-A-C-A¹-C-G-C-G-PP-Bn-Bn-A-Bn- | 176 |
| | A¹-G-C-G¹ | |
| 4149-8_220 | Bn-Bn-A¹-C-Heg-G-Bn-Bn-A-C-A¹-C-G-C-G-Bn-PP-Bn-A-Bn- | 177 |
| | A¹-G-C-G¹ | |
| 4149-8_221 | Bn-Bn-A¹-C-Heg-G-Bn-Bn-A-C-A¹-C-G-C-G-Bn-Bn-PP-A-Bn- | 178 |
| | A¹-G-C-G¹ | |
| 4149-8_222 | Bn-Bn-A¹-C-Heg-G-Bn-Bn-A-C-A¹-C-G-C-G-Bn-Bn-Bn-A-PP- | 179 |
| | A¹-G-C-G¹ | |
| 4149-8_223 | Tyr-Bn-A¹-C-Heg-G-Bn-Bn-A-C-A¹-C-G-C-G-Bn-Bn-Bn-A-Bn- | 180 |
| | A¹-G-C-G¹ | |
| 4149-8_224 | Bn-Tyr-A¹-C-Heg-G-Bn-Bn-A-C-A¹-C-G-C-G-Bn-Bn-Bn-A-Bn- | 181 |
| | A¹-G-C-G¹ | |
| 4149-8_225 | Bn-Bn-A¹-C-Heg-G-Tyr-Bn-A-C-A¹-C-G-C-G-Bn-Bn-Bn-A-Bn- | 182 |
| | A¹-G-C-G¹ | |
| 4149-8_226 | Bn-Bn-A¹-C-Heg-G-Bn-Tyr-A-C-A¹-C-G-C-G-Bn-Bn-Bn-A-Bn- | 183 |
| | A¹-G-C-G¹ | |
| 4149-8_227 | Bn-Bn-A¹-C-Heg-G-Bn-Bn-A-C-A¹-C-G-C-G-Tyr-Bn-Bn-A-Bn- | 184 |
| | A¹-G-C-G¹ | |
| 4149-8_228 | Bn-Bn-A¹-C-Heg-G-Bn-Bn-A-C-A¹-C-G-C-G-Bn-Tyr-Bn-A-Bn- | 185 |
| | A¹-G-C-G¹ | |
| 4149-8_229 | Bn-Bn-A¹-C-Heg-G-Bn-Bn-A-C-A¹-C-G-C-G-Bn-Bn-Tyr-A-Bn- | 186 |
| | A¹-G-C-G¹ | |
| 4149-8_230 | Bn-Bn-A¹-C-Heg-G-Bn-Bn-A-C-A¹-C-G-C-G-Bn-Bn-Bn-A-Tyr- | 187 |
| | A¹-G-C-G¹ | |
| 4149-8_231 | FBn-Bn-A¹-C-Heg-G-Bn-Bn-A-C-A¹-C-G-C-G-Bn-Bn-Bn-A-Bn- | 188 |
| | A¹-G-C-G¹ | |
| 4149-8_232 | Bn-FBn-A¹-C-Heg-G-Bn-Bn-A-C-A¹-C-G-C-G-Bn-Bn-Bn-A-Bn- | 189 |
| | A¹-G-C-G¹ | |
| 4149-8_233 | Bn-Bn-A¹-C-Heg-G-FBn-Bn-A-C-A¹-C-G-C-G-Bn-Bn-Bn-A-Bn- | 190 |
| | A¹-G-C-G¹ | |
| 4149-8_234 | Bn-Bn-A¹-C-Heg-G-Bn-FBn-A-C-A¹-C-G-C-G-Bn-Bn-Bn-A-Bn- | 191 |
| | A¹-G-C-G¹ | |
| 4149-8_235 | Bn-Bn-A¹-C-Heg-G-Bn-Bn-A-C-A¹-C-G-C-G-FBn-Bn-Bn-A-Bn- | 192 |
| | A¹-G-C-G¹ | |
| 4149-8_236 | Bn-Bn-A¹-C-Heg-G-Bn-Bn-A-C-A¹-C-G-C-G-Bn-FBn-Bn-A-Bn- | 193 |
| | A¹-G-C-G¹ | |
| 4149-8_237 | Bn-Bn-A¹-C-Heg-G-Bn-Bn-A-C-A¹-C-G-C-G-Bn-Bn-FBn-A-Bn- | 194 |
| | A¹-G-C-G¹ | |
| 4149-8_238 | Bn-Bn-A¹-C-Heg-G-Bn-Bn-A-C-A¹-C-G-C-G-Bn-Bn-Bn-A-FBn- | 195 |
| | A¹-G-C-G¹ | |
| 4149-8_239 | Bn-Bn-A¹-C^{o}-Heg-G-Bn-Bn-A-C-A¹-C-G-C-G-Bn-Bn-Bn-A-Bn- | 196 |
| | A¹-G-C-G¹ | |
| 4149-8_240 | Bn-Bn-A¹-C-Heg-G-Bn-Bn-A-C^{o}-A¹-C-G-C-G-Bn-Bn-Bn-A-Bn- | 197 |
| | A¹-G-C-G¹ | |
| 4149-8_241 | Bn-Bn-A¹-C-Heg-G-Bn-Bn-A-C-A¹-C^{o}-G-C-G-Bn-Bn-Bn-A-Bn- | 198 |
| | A¹-G-C-G¹ | |
| 4149-8_242 | Bn-Bn-A¹-C-Heg-G-Bn-Bn-A-C-A¹-C-G-C^{o}-G-Bn-Bn-Bn-A-Bn- | 199 |
| | A¹-G-C-G¹ | |
| 4149-8_243 | Bn-Bn-A¹-C-Heg-G-Bn-Bn-A-C-A¹-C-G-C-G-Bn-Bn-Bn-A-Bn- | 200 |
| | A¹-G-C^{o}-G¹ | |
| 4149-8_245 | Bn-Bn-A¹-C-Heg-G-Bn-Bn-A-C-A¹-C-G-C-G-Bn-Bn-Bn-A¹-Bn- | 201 |
| | A¹-G-C-G¹ | |
| 4149-8_246 | Bn-Bn-A¹-C-Heg-G¹-Bn-Bn-A-C-A¹-C-G-C-G-Bn-Bn-Bn-A-Bn- | 202 |
| | A¹-G-C-G¹ | |
| 4149-8_247 | Bn-Bn-A¹-C-Heg-G-Bn-Bn-A-C-A¹-C-G¹-C-G-Bn-Bn-Bn-A-Bn- | 203 |
| | A¹-G-C-G¹ | |
| 4149-8_248 | Bn-Bn-A¹-C-Heg-G-Bn-Bn-A-C-A¹-C-G-C-G¹-Bn-Bn-Bn-A-Bn- | 204 |
| | A¹-G-C-G¹ | |
| 4149-8_249 | Bn-Bn-A¹-C-Heg-G-Bn-Bn-A-C-A¹-C-G-C-G-Bn-Bn-Bn-A-Bn- | 205 |
| | A¹-G¹-C-G¹ | |
| 4149-8_254 | Tyr-Bn-A¹-C-Heg-G-FBn-Bn-A-C-A¹-C-G-C-G-2Nap-Bn-Bn-A- | 206 |
| | Bn-A¹-G-C-G¹ | |
| 4149-8_255 | Bn-Bn-A¹-C-Heg-G-Bn-Ib-A-C-A¹-C-G-C-G-Bn-Pe-Th-A-Bn-A¹- | 207 |
| | G-C-G¹ | |
| 4149-8_256 | Bn-Bn-A¹-C-Heg-G-2Nap-Ib-A-C-A¹-C-G-C-G-Bn-Bn-Bn-A-Bn- | 208 |
| | A¹-G-C-G¹ | |
| 4149-8_257 | Bn-Bn-A¹-C-Heg-G-NE-Ib-A-C-A¹-C-G-C-G-Bn-Bn-Bn-A-Bn-A¹- | 209 |
| | G-C-G¹ | |
| 4149-8_259 | Bn-Bn-A¹-C-Heg-G-Ib-Ib-A-C-A¹-C-G-C-G-Bn-Bn-Bn-A-Bn-A¹- | 210 |
| | G-C-G¹ | |
| 4149-8_260 | Bn-Bn-A¹-C-Heg-G-Bn-Bn-A-C-A¹-C-G-C-G-Bn-Pe-Th-A-Bn-A¹- | 211 |
| | G-C-G¹ | |
| 4149-8_261 | Bn-Bn-A¹-C-Heg-G-Bn-Bn-A-C-A¹-C-G-C-G-Bn-Pe-Pe-A-Bn-A¹- | 212 |
| | G-C-G¹ | |
| 4149-8_262 | Bn-Bn-A¹-C-Heg-G-Bn-Bn-A-C-A¹-C-G-C-G-Bn-Th-Th-A-Bn-A¹- | 213 |
| | G-C-G¹ | |
| 4149-8_263 | Bn-Bn-A¹-C-Heg-G-Bn-Bn-A-C-A¹-C-G-C-G-2Nap-Pe-Th-A-Bn- | 214 |
| | A¹-G-C-G¹ | |
| 4149-8_264 | Bn-Bn-A¹-C-Heg-G-Bn-Bn-A-C-A¹-C-G-C-G-Th-Pe-Th-A-Bn-A¹- | 215 |
| | G-C-G¹ | |
| 4149-8_265 | Bn-Bn-A¹-C-Heg-G-Bn-Bn-A-C-A¹-C-G-C-G-Ib-Pe-Th-A-Bn-A¹- | 216 |
| | G-C-G¹ | |
| 4149-8_266 | Bn-Bn-A¹-C-Heg-G-Bn-Ib-A-C-A¹-C-G-C-G-Th-Pe-Th-A-Bn-A¹- | 217 |
| | G-C-G¹ | |
| 4149-8_267 | Bn-Ib-A¹-C-Heg-G-Ib-Ib-A-C-A¹-C-G-C-G-Ib-Bn-Bn-A-Bn-A¹-G- | 218 |
| | C-G¹ | |
| 4149-8_268 | 2Nap-2Nap-A¹-C-Heg-G-2Nap-Bn-A-C-A¹-C-G-C-G-2Nap-Bn- | 219 |
| | Bn-A-Bn-A¹-G-C-G¹ | |
| 4149-8_269 | NE-Bn-A¹-C-Heg-G-NE-Bn-A-C-A¹-C-G-C-G-Bn-Bn-Bn-A-NE- | 220 |
| | A¹-G-C-G¹ | |
| 4149-8_270 | Th-Bn-A¹-C-Heg-G-Bn-Bn-A-C-A¹-C-G-C-G-Th-Bn-Th-A-Bn-A¹- | 221 |
| | G-C-G¹ | |
| 4149-8_271 | Bn-Bn-A¹-C-Heg-G-Bn-Bn-A-C-A¹-C¹-G-C-G-Bn-Bn-Bn-A¹-Bn- | 222 |
| | A¹-G¹-C-G¹ | |
| 4149-8_272 | Bn-Bn-A¹-C-Heg-G-Bn-Bn-A-C-A¹-C-G-C-G-Bn-Bn-Bn-A¹-Bn- | 223 |
| | A¹-G¹-C-G¹ | |
| 4149-8_273 | Bn-Bn-A¹-C-Heg-G-Bn-Bn-A-C-A¹-C¹-G-C-G-Bn-Bn-Bn-A¹-Bn- | 224 |
| | A¹-G-C-G¹ | |
| 4149-8_274 | Bn-Bn-A¹-C-Heg-G-Bn-Bn-A-C-A¹-C¹-G-C-G-Bn-Bn-Bn-A-Bn- | 225 |
| | A¹-G¹-C-G¹ | |
| 4149-8_275 | Bn-Bn-A¹-C-Heg-G-Bn-Ib-A-C-A¹-C-G-C-G-2Nap-Pe-Th-A-Bn- | 226 |
| | A¹-G-C-G¹ | |
| 4149-8_279 | Bn-Bn-A¹-C-Heg-G-Bn-Ib-A-C-A¹-C-G-C-G-Bn-Pe-Th-A-Bn-A¹- | 227 |
| | G-C-G¹ | |
| 4149-8_280 | Bn-Bn-A¹-C-Heg-G-Bn-Ib-A-C-A¹-C-G-C-G-Bn-Pe-Th-A¹-Bn-A¹- | 228 |
| | G-C-G¹ | |
| 4149-8_281 | Bn-Bn-A¹-C-Heg-G-Bn-Ib-A-C-A¹-C-G-C-G-Bn-Pe-Th-A-Bn-A¹- | 229 |
| | G¹-C-G¹ | |
| 4149-8_282 | Bn-Bn-A¹-C-Heg-G-Bn-Ib-A-C-A¹-C-G-C-G-Bn-Pe-Th-A¹-Bn- | 230 |
| | A¹-G-C-G¹ | |
| 4149-8_283 | Bn-Bn-A¹-C-Heg-G-Bn-Ib-A-C-A¹-C-G-C-G-Bn-Pe-Th-A¹-Bn- | 231 |
| | A¹-G¹-C-G¹ | |
| 4149-8_284 | Bn-Bn-A¹-C-Heg-G-Bn-Bn-A-C-A¹-C^{o}-G-C-G-Bn-Bn-Bn-A¹-Bn- | 232 |
| | A¹-G-C-G¹ | |
| 4149-8_285 | Bn-Bn-A¹-C-Heg-G-Bn-Bn-A-C¹-A¹-C¹-G-C-G-Bn-Bn-Bn-A¹-Bn- | 233 |
| | A¹-G-C¹-G¹ | |
| 4149-8_286 | Bn-Bn-A¹-C-Heg-G-Bn-Bn-A-C¹-A¹-C¹-G-C-G-Bn-Bn-Bn-A¹-Bn- | 234 |
| | A¹-G¹-C¹-G¹ | |
| 4149-8_287 | Bn-Bn-A¹-C-Heg-G-Bn-Bn-A-C-C3-C3-G-C-G-Bn-Bn-Bn-A¹-Bn- | 235 |
| | A¹-G-C-G¹ | |
| 4149-8_288 | Bn-Bn-A¹-C-Heg-G-Bn-Bn-A-C-C3--G-C-G-Bn-Bn-Bn-A¹-Bn-A¹- | 236 |
| | G-C-G¹ | |
| 4149-8_289 | Bn-Bn-A¹-C-Heg-G-Bn-Bn-A-C-C3-C-G-C-G-Bn-Bn-Bn-A¹-Bn- | 237 |
| | A¹-G-C-G¹ | |
| 4149-8_290 | Bn-Bn-A¹-C-Heg-G-Bn-Bn-A-C-A¹-C3-G-C-G-Bn-Bn-Bn-A¹-Bn- | 238 |
| | A¹-G-C-G¹ | |
| 4149-8_291 | Bn-Bn-A¹-C-Heg-G-Bn-Bn-A-C-Heg-G-C-G-Bn-Bn-Bn-A¹-Bn- | 239 |
| | A¹-G-C-G¹ | |
| 4149-8_292 | Bn-Bn-A-C-G-C-A-C-G-C-G-Bn-Bn-A-C-A-C-G-C-G-Bn-Bn-Bn- | 240 |
| | A-Bn-A-G-C-G | |
| 4149-8_293 | Bn-Bn-A-C-C-A-C-G--G-Bn-Bn-A-C-A-C-G-C-G-Bn-Bn-Bn-A- | 241 |
| | Bn-A-G-C-G | |
| 4149-8_294 | Bn-Bn-A¹-C-Heg-G-Bn-Bn-A-C-T-C-G-C-G-Bn-Bn-Bn-A-Bn-A¹- | 242 |
| | G-C-G¹ | |
| 4149-8_295 | Bn-Bn-A¹-C-Heg-G-Bn-Bn-A-C-C-C-G-C-G-Bn-Bn-Bn-A-Bn-A¹- | 243 |
| | G-C-G¹ | |
| 4149-8_296 | Bn-Bn-A¹-C-Heg-G-Bn-Bn-A-C-G-C-G-C-G-Bn-Bn-Bn-A-Bn-A¹- | 244 |
| | G-C-G¹ | |
| 4149-8_297 | Bn-Bn-A¹-C-Heg-G-Bn-Bn-A-C-A¹-T-G-C-G-Bn-Bn-Bn-A-Bn-A¹- | 245 |
| | G-C-G¹ | |
| 4149-8_298 | Bn-Bn-A¹-C-Heg-G-Bn-Bn-A-C-A¹-A-G-C-G-Bn-Bn-Bn-A-Bn- | 246 |
| | A¹-G-C-G¹ | |
| 4149-8_299 | Bn-Bn-A¹-C-Heg-G-Bn-Bn-A-C-A¹-G-G-C-G-Bn-Bn-Bn-A-Bn- | 247 |
| | A¹-G-C-G¹ | |
| 4149-8_300 | Bn-Bn-A¹-C-Heg-G-Bn-Bn-A-C-T-G-C-G-Bn-Bn-Bn-A-Bn-A¹-G- | 248 |
| | C-G¹ | |
| 4149-8_301 | Bn-Bn-A¹-C-Heg-G-Bn-Bn-A-C-A-G-C-G-Bn-Bn-Bn-A-Bn-A¹-G- | 249 |
| | C-G¹ | |
| 4149-8_302 | Bn-Bn-A¹-C-Heg-G-Bn-Bn-A-C-G-G-C-G-Bn-Bn-Bn-A-Bn-A¹-G- | 250 |
| | C-G¹ | |
| 4149-8_303 | Bn-Bn-A¹-C-Heg-G-Bn-Bn-A-C-C-G-C-G-Bn-Bn-Bn-A-Bn-A¹-G- | 251 |
| | C-G¹ | |
| 4149-8_307 | Bn-Bn-A¹-C-Heg-G-Bn¹-Bn-A-C-A¹-C-G-C-G-Bn-Bn-Bn-A-Bn- | 252 |
| | A¹-G-C-G¹ | |
| 4149-8_308 | Bn-Bn-A¹-C-Heg-G-Bn-Bn¹-A-C-A¹-C-G-C-G-Bn-Bn-Bn-A-Bn- | 253 |
| | A¹-G-C-G¹ | |
| 4149-8_311 | Bn-Bn-A¹-C-Heg-G-Bn-Bn-A-C-A¹-C-G-C-G-Bn-Bn-Bn¹-A-Bn- | 254 |
| | A¹-G-C-G¹ | |
| 4149-8_312 | Bn-Bn-A¹-C-Heg-G-Bn-Bn-A-C-A¹-C-G-C-G-Bn-Bn-Bn-A-Bn¹- | 255 |
| | A¹-G-C-G¹ | |
| 4149-8_321 | Bn-Bn-A¹-C-Heg-G-Bn-Bn-A-C-A¹-C-G-C-G-Bn-Pe-Bn-A-MBn- | 256 |
| | A¹-G-C-G¹ | |
| 4149-8_322 | Bn-Bn-A¹-C-Heg-G-Bn-Bn-A-C-A¹-C-G-C-G-Bn-Pe-Th-A-MBn- | 257 |
| | A¹-G-C-G¹ | |
| 4149-8_323 | Bn-Bn-A¹-C-Heg-G-Bn-Bn-A-C-A¹-C¹-G-C-G-Bn-Pe-Th-A¹-Bn- | 258 |
| | A¹-G-C-G¹ | |
| 4149-8_324 | Bn-Bn-A¹-C-Heg-G-Bn-Bn-A-C-A¹-C¹-G-C-G-Th-Pe-Th-A¹-Bn- | 259 |
| | A¹-G-C-G¹ | |
| 4149-8_325 | Bn-Bn-A¹-C-Heg-G-Bn¹-Bn-A-C-A¹-C¹-G-C-G-Bn-Bn-Bn-A¹-Bn- | 260 |
| | A¹-G-C-G¹ | |
| 4149-8_326 | Bn-Bn-A¹-C-Heg-G-Bn-Bn-A-C-A¹-C¹-G-C-G-Bn-Bn-Bn¹-A¹-Bn- | 261 |
| | A¹-G-C-G¹ | |
| 4149-8_327 | Bn-Bn-A¹-C-Heg-G-Bn¹-Bn-A-C-A¹-C¹-G-C-G-Bn-Bn-Bn¹-A¹-Bn- | 262 |
| | A¹-G-C-G¹ | |
| 4149-8_328 | Bn-Bn-A¹-C-Heg-G-Bn-Bn-A-C-A¹-C¹-G-C-G-Bn-Pe-Bn¹-A¹-Bn- | 263 |
| | A¹-G-C-G¹ | |
| 4149-8_329 | Bn-Bn-A¹-C-Heg-G-Bn-Bn-A-C-A¹-C¹-G-C-G-Bn-Bn-Bn-A¹- | 264 |
| | MBn-A¹-G-C-G¹ | |
| 4149-8_330 | Bn-Bn-A¹-C-Heg-G-Bn-Bn-A-C-A¹-C¹-G-C-G-Bn-Pe-Bn-A¹- | 265 |
| | MBn-A¹-G-C-G¹ | |
| 4149-8_331 | Bn-Bn-A¹-C-Heg-G-Bn-Bn-A-C-A¹-C¹-G-C-G-Bn-Pe-Th-A¹- | 266 |
| | MBn-A¹-G-C-G¹ | |
| 4149-8_332 | Bn-Bn-A¹-C-Heg-G-Bn-Bn-A-C-C3-C¹-G-C-G-Bn-Pe-Bn-A¹- | 267 |
| | MBn-A¹-G-C-G¹ | |
| 4149-8_333 | Bn-Bn-A¹-C-Heg-G-Bn-Bn-A-C-C3-C¹-G-C-G-Bn-Pe-Th-A¹- | 268 |
| | MBn-A¹-G-C-G¹ | |
| 4149-8_334 | Bn-Bn-A¹-C-Heg-G-Bn-Bn-A-C-A¹-C-G-C-G-Bn-Pe-Th-A-Bn-A¹- | 269 |
| | G-C-G¹-Heg-Heg-Bn-Bn-A¹-C-Heg-G-Bn-Bn-A-C-A¹-C-G-C-G- | |
| | Bn-Pe-Th-A-Bn-A¹-G-C-G¹ | |
| 4149-8_335 | Bn-Bn-A¹-C-Heg-G-Bn-Bn-A-C-A¹-C-G-C-G-Bn-Pe-Th-A-Bn-A¹- | 270 |
| | G-C-G¹-Heg-Heg-Heg-Bn-Bn-A¹-C-Heg-G-Bn-Bn-A-C-A¹-C-G- | |
| | C-G-Bn-Pe-Th-A-Bn-A¹-G-C-G¹ | |
| 4149-8_336 | Bn-Bn-A¹-C-Heg-G-Bn-Bn-A-C-A¹-C-G-C-G-Bn-Pe-Th-A-Bn-A¹- | 271 |
| | G-C-G¹-Heg-Heg-Heg-Heg-Bn-Bn-A¹-C-Heg-G-Bn-Bn-A-C-A¹- | |
| | C-G-C-G-Bn-Pe-Th-A-Bn-A¹-G-C-G¹ | |
| 4149-8_337 | Bn-Bn-A¹-C-Heg-G-Bn-Bn-A-C-A¹-C-G-C-G-Bn-Pe-Th-A-Bn-A¹- | 272 |
| | G-C-G¹-Heg-Heg-Heg-Heg-Heg-Bn-Bn-A¹-C-Heg-G-Bn-Bn-A- | |
| | C-A¹-C-G-C-G-Bn-Pe-Th-A-Bn-A¹-G-C-G¹ | |
| 4149-8_338 | Bn-Bn-A¹-C-Heg-G-Bn-Bn-A-C-A¹-C-G-C-G-Bn-Pe-Th-A-Bn-A¹- | 273 |
| | G-C-G¹-Heg-Heg-Heg-Heg-Heg-Heg-Bn-Bn-A¹-C-Heg-G-Bn- | |
| | Bn-A-C-A¹-C-G-C-G-Bn-Pe-Th-A-Bn-A¹-G-C-G¹ | |
| 4149-8_339 | Bn-Bn-A¹-C-Heg-G-Bn-Bn-A-C-A¹-C-G-C-G-Bn-Pe-Th-A-Bn-A¹- | 274 |
| | G-C-G¹-C3-(3′-Doubler)-T | |
| 4149-8_340 | Bn-Bn-A¹-C-Heg-G-Bn-Bn-A-C-A¹-C-G-C-G-Bn-Pe-Th-A-Bn-A¹- | 275 |
| | G-C-G¹-Heg-(3′-Doubler)-T | |
| 4149-8_341 | Bn-Bn-A¹-C-Heg-G-Bn-Bn-A-C-A¹-C-G-C-G-Bn-Pe-Th-A-Bn-A¹- | 276 |
| | G-C-G¹-Heg-Heg-(3′-Doubler)-T | |
| 4149-8_342 | Bn-Bn-A¹-C-Heg-G-Bn-Bn-A-C-A¹-C-G-C-G-Bn-Pe-Th-A-Bn-A¹- | 277 |
| | G-C-G¹-Heg-Heg-Heg-(3′-Doubler)-T | |
| 4149-8_343 | Bn-Bn-A¹-C-Heg-G-Bn¹-Bn-A-C-A¹-C¹-G-C-G-Bn-Pe-Bn¹-A¹-Bn- | 278 |
| | A¹-G-C-G¹ | |
| 4149-8_344 | Bn-Bn-A¹-C-Heg-G^{o}-Bn¹-Bn-A-C-A¹-C¹-G-C-G-Bn-Pe-Bn¹-A¹- | 279 |
| | Bn-A¹-G-C-G¹ | |
| 4149-8_345 | Bn-Bn-A¹-C-Heg-G-Bn¹-Bn-A-C-A¹-C¹-G^{o}-C-G-Bn-Pe-Bn¹-A¹- | 280 |
| | Bn-A¹-G-C-G¹ | |
| 4149-8_346 | Bn-Bn-A¹-C-Heg-G-Bn¹-Bn-A-C-A¹-C¹-G-C-G^{o}-Bn-Pe-Bn¹-A¹- | 281 |
| | Bn-A¹-G-C-G¹ | |
| 4149-8_347 | Bn-Bn-A¹-C-Heg-G-Bn¹-Bn-A-C-A¹-C¹-G-C-G-Bn-Pe-Bn¹-A¹-Bn- | 282 |
| | A¹-G^{o}-C-G¹ | |
| 4149-8_349 | Bn-Bn-A¹-C^{o}-Heg-G-Bn¹-Bn-A-C-A¹-C¹-G-C-G-Bn-Pe-Bn¹-A¹- | 283 |
| | Bn-A¹-G-C-G¹ | |
| 4149-8_352 | Bn-Bn-A¹-C-Heg-G-Bn¹-Bn-A-C-A¹-C¹-G-C-G-Bn-Pe-Bn¹-A¹-Bn- | 284 |
| | A¹-G-C^{o}-G¹ | |
| 4149-8_353 | Bn-Bn-A¹-C-Heg-G-Bn-Bn-A^{o}-C-A¹-C¹-G-C-G-Bn-Pe-Bn¹-A¹- | 285 |
| | Bn-A¹-G-C-G¹ | |
| 4149-8_354 | 2Nap-Bn-A¹-C-Heg-G-Bn-Bn-A-C-A¹-C¹-G-C-G-Bn-Pe-Bn¹-A¹- | 286 |
| | Bn-A¹-G-C-G¹ | |
| 4149-8_355 | FBn-Bn-A¹-C-Heg-G-Bn-Bn-A-C-A¹-C¹-G-C-G-Bn-Pe-Bn¹-A¹- | 287 |
| | Bn-A¹-G-C-G¹ | |
| 4149-8_356 | NE-Bn-A¹-C-Heg-G-Bn-Bn-A-C-A¹-C¹-G-C-G-Bn-Pe-Bn¹-A¹-Bn- | 288 |
| | A¹-G-C-G¹ | |
| 4149-8_357 | 2NE-Bn-A¹-C-Heg-G-Bn-Bn-A-C-A¹-C¹-G-C-G-Bn-Pe-Bn¹-A¹- | 289 |
| | Bn-A¹-G-C-G¹ | |
| 4149-8_358 | PP-Bn-A¹-C-Heg-G-Bn-Bn-A-C-A¹-C¹-G-C-G-Bn-Pe-Bn¹-A¹-Bn- | 290 |
| | A¹-G-C-G¹ | |
| 4149-8_359 | Ib-Bn-A¹-C-Heg-G-Bn-Bn-A-C-A¹-C¹-G-C-G-Bn-Pe-Bn¹-A¹-Bn- | 291 |
| | A¹-G-C-G¹ | |
| 4149-8_360 | Bn-MBn-A¹-C-Heg-G-Bn-Bn-A-C-A¹-C¹-G-C-G-Bn-Pe-Bn¹-A¹- | 292 |
| | Bn-A¹-G-C-G¹ | |
| 4149-8_361 | T-Bn-A¹-C-Heg-G-Bn-Bn-A-C-A¹-C-G-C-G-Bn-Bn-Bn-A-Bn-A¹- | 293 |
| | G-C-G¹ | |
| 4149-8_362 | Bn-T-A¹-C-Heg-G-Bn-Bn-A-C-A¹-C-G-C-G-Bn-Bn-Bn-A-Bn-A¹- | 294 |
| | G-C-G¹ | |
| 4149-8_363 | Bn-Bn-A¹-C-Heg-G-T-Bn-A-C-A¹-C-G-C-G-Bn-Bn-Bn-A-Bn-A¹- | 295 |
| | G-C-G¹ | |
| 4149-8_369 | Bn-Bn-A¹-C-Heg-G-Bn-Bn-A²-C-A¹-C¹-G-C-G-Bn-Pe-Bn¹-A¹-Bn- | 296 |
| | A¹-G-C-G¹ | |
| 4149-8_370 | Bn-Bn-A¹-C-Heg-G-Bn¹-Bn-A²-C-A¹-C¹-G-C-G-Bn-Pe-Bn¹-A¹- | 297 |
| | Bn-A¹-G-C-G¹ | |
| 4149-8_371 | Bn-Bn-A¹-C-Heg-G-Bn-Bn-A-C-A¹-C¹-G-C-G²-Bn-Pe-Bn¹-A¹-Bn- | 298 |
| | A¹-G-C-G¹ | |
| 4149-8_372 | Bn-Bn-A¹-C-Heg-G-Bn¹-Bn-A-C-A¹-C¹-G-C-G²-Bn-Pe-Bn¹-A¹- | 299 |
| | Bn-A¹-G-C-G¹ | |
| 4149-8_373 | Bn-Bn-A¹-C-Heg-G-Bn-Bn-A²-C-A¹-C¹-G-C-G²-Bn-Pe-Bn¹-A¹- | 300 |
| | Bn-A¹-G-C-G¹ | |
| 4149-8_374 | Bn-Bn-A¹-C-Heg-G-Bn¹-Bn-A²-C-A¹-C¹-G-C-G²-Bn-Pe-Bn¹-A¹- | 301 |
| | Bn-A¹-G-C-G¹ | |
| 4149-8_375 | FBn-Bn-A¹-C-Heg-G-Bn¹-Bn-A-C-A¹-C¹-G-C-G-Bn-Bn-Bn¹-A¹- | 302 |
| | Bn-A¹-G-C-G¹ | |
| 4149-8_376 | Bn-MBn-A¹-C-Heg-G-Bn¹-Bn-A-C-A¹-C¹-G-C-G-Bn-Bn-Bn¹-A¹- | 303 |
| | Bn-A¹-G-C-G¹ | |
| 4149-8_377 | FBn-MBn-A¹-C-Heg-G-Bn¹-Bn-A-C-A¹-C¹-G-C-G-Bn-Bn-Bn¹-A¹- | 304 |
| | Bn-A¹-G-C-G¹ | |
| 4149-8_378 | FBn-Bn-A¹-C-Heg-G-Bn¹-Bn-A-C-C3-C¹-G-C-G-Bn-Bn-Bn¹-A¹- | 305 |
| | Bn-A¹-G-C-G¹ | |
| 4149-8_379 | Bn-MBn-A¹-C-Heg-G-Bn¹-Bn-A-C-C3-C¹-G-C-G-Bn-Bn-Bn¹-A¹- | 306 |
| | Bn-A¹-G-C-G¹ | |
| 4149-8_380 | FBn-MBn-A¹-C-Heg-G-Bn¹-Bn-A-C-C3-C¹-G-C-G-Bn-Bn-Bn¹- | 307 |
| | A¹-Bn-A¹-G-C-G¹ | |
| 4149-8_381 | FBn-Bn-A¹-C-Heg-G-Bn¹-Bn-A-C-A¹-C¹-G-C-G-Bn-Pe-Bn¹-A¹- | 308 |
| | Bn-A¹-G-C-G¹ | |
| 4149-8_382 | Bn-MBn-A¹-C-Heg-G-Bn¹-Bn-A-C-A¹-C¹-G-C-G-Bn-Pe-Bn¹-A¹- | 309 |
| | Bn-A¹-G-C-G¹ | |
| 4149-8_383 | FBn-MBn-A¹-C-Heg-G-Bn¹-Bn-A-C-A¹-C¹-G-C-G-Bn-Pe-Bn¹-A¹- | 310 |
| | Bn-A¹-G-C-G¹ | |
| 4149-8_384 | FBn-Bn-A¹-C-Heg-G-Bn¹-Bn-A-C-C3-C¹-G-C-G-Bn-Pe-Bn¹-A¹- | 311 |
| | Bn-A¹-G-C-G¹ | |
| 4149-8_385 | Bn-MBn-A¹-C-Heg-G-Bn¹-Bn-A-C-C3-C¹-G-C-G-Bn-Pe-Bn¹-A¹- | 312 |
| | Bn-A¹-G-C-G¹ | |
| 4149-8_386 | FBn-MBn-A¹-C-Heg-G-Bn¹-Bn-A-C-C3-C¹-G-C-G-Bn-Pe-Bn¹-A¹- | 313 |
| | Bn-A¹-G-C-G¹ | |
| 4149-8_388 | Bn-Bn-A¹-C-Heg-G-Bn-Bn-A²-C-A¹-C¹-G-C-G²-Bn-Bn-Bn¹-A¹- | 314 |
| | Bn-A¹-G-C-G¹ | |
| 4149-8_389 | Bn-Bn-A¹-C-Heg-G-Bn¹-Bn-A²-C-A¹-C¹-G-C-G²-Bn-Bn-Bn¹-A¹- | 315 |
| | Bn-A1-G-C-G1 | |
| 4149-8_390 | Bn-Bn-A¹-C-Heg-G-Bn¹-Bn-A²-C-C3-C¹-G-C-G²-Bn-Pe-Bn¹-A¹- | 316 |
| | Bn-A¹-G-C-G¹ | |
| 4149-8_391 | Bn-Bn-A¹-C-Heg-G-Bn-Bn-A²-C-C3-C¹-G-C-G²-Bn-Bn-Bn¹-A¹- | 317 |
| | Bn-A¹-G-C-G¹ | |
| 4149-8_392 | Bn-Bn-A¹-C-Heg-G-Bn¹-Bn-A²-C-C3-C¹-G-C-G²-Bn-Bn-Bn¹-A¹- | 318 |
| | Bn-A¹-G-C-G¹ | |
| 4149-8_393 | FBn-Bn-A¹-C-Heg-G-Bn-Bn-A²-C-A¹-C¹-G-C-G²-Bn-Pe-Bn¹-A¹- | 319 |
| | Bn-A¹-G-C-G¹ | |
| 4149-8_394 | Bn-MBn-A¹-C-Heg-G-Bn-Bn-A²-C-A¹-C¹-G-C-G²-Bn-Pe-Bn¹-A¹- | 320 |
| | Bn-A¹-G-C-G¹ | |
| 4149-8_395 | FBn-MBn-A¹-C-Heg-G-Bn-Bn-A²-C-A¹-C¹-G-C-G²-Bn-Pe-Bn¹- | 321 |
| | A¹-Bn-A¹-G-C-G¹ | |
| 4149-8_396 | FBn-Bn-A¹-C-Heg-G-Bn-Bn-A²-C-C3-C¹-G-C-G²-Bn-Pe-Bn¹-A¹- | 322 |
| | Bn-A¹-G-C-G¹ | |
| 4149-8_397 | Bn-MBn-A¹-C-Heg-G-Bn-Bn-A²-C-C3-C¹-G-C-G²-Bn-Pe-Bn¹-A¹- | 323 |
| | Bn-A¹-G-C-G¹ | |
| 4149-8_398 | FBn-MBn-A¹-C-Heg-G-Bn-Bn-A²-C-C3-C¹-G-C-G²-Bn-Pe-Bn¹- | 324 |
| | A¹-Bn-A¹-G-C-G¹ | |
| 4149-8_399 | FBn-MBn-A¹-C-Heg-G-Bn¹-Bn-A²-C-C3-C¹-G-C-G²-Bn-Bn-Bn¹- | 325 |
| | A¹-Bn-A¹-G-C-G¹ | |
| 4149-8_400 | FBn-MBn-A¹-C-Heg-G-Bn¹-Bn-A²-C-A¹-C¹-G-C-G²-Bn-Bn-Bn¹- | 326 |
| | A¹-Bn-A¹-G-C-G¹ | |
| 4149-8_402 | Bn-Bn-A-C-G-A-C-Bn-A-C-G-Bn-Bn-A-C-A-G-C-G--Bn-Bn-Bn- | 327 |
| | A-Bn-A-G-C | |
| 4149-8_403 | Bn-Bn-A-C-Heg-G-Bn-Bn-A-C-A-G-C-G--Bn-Bn-Bn-A-Bn-A-G- | 328 |
| | C | |
| 4149-8_404 | Bn-Bn-A-C-Heg-G-Bn-Bn-A-C-C3-G-C-G-Bn-Bn-Bn-A-Bn-A-G- | 329 |
| | C | |
| 4149-8_418 | Bn-MBn-A¹-C-Heg-G-Bn¹-Bn-A-C-C3-C¹-G-C-G¹-Bn-Bn-Bn¹-A¹- | 330 |
| | Bn-A¹-G-C-G¹ | |
| 4149-8_419 | Bn-MBn-A¹-C-Heg-G-Bn¹-Bn-A-C-C3-C¹-G-C-G¹-Nap-Bn-Bn¹- | 331 |
| | A¹-Bn-A¹-G-C-G¹ | |
| 4149-8_420 | Bn-MBn-A¹-C-Heg-G-Bn¹-Bn-A-C-C3-C¹-G-C-G¹-2Nap-Bn-Bn¹- | 332 |
| | A¹-Bn-A¹-G-C-G¹ | |
| 4149-8_421 | Bn-MBn-A¹-C-Heg-G-Bn¹-Bn-A-C-C3-C¹-G¹-C-G-Bn-Bn-Bn¹-A¹- | 333 |
| | Bn-A¹-G-C-G¹ | |
| 4149-8_422 | Bn-MBn-A¹-C-Heg-G-Bn¹-Bn-A-C-C3-C¹-G¹-C-G¹-Bn-Bn-Bn¹- | 334 |
| | A¹-Bn-A¹-G-C-G¹ | |
| 4149-8_423 | Bn-MBn-A¹-C-Heg-G-Bn¹-Bn-A-C-C3-C¹-G¹-C-G-Nap-Bn-Bn¹- | 335 |
| | A¹-Bn-A¹-G-C-G¹ | |
| 4149-8_424 | Bn-MBn-A¹-C-Heg-G-Bn¹-Bn-A-C-C3-C¹-G¹-C¹-G-Bn-Bn-Bn¹- | 336 |
| | A¹-Bn-A¹-G-C-G¹ | |
| 4149-8_425 | Bn-MBn-A¹-C-Heg-G-Bn¹-Bn-A¹-C-C3-C¹-G-C-G-Bn-Bn-Bn¹-A¹- | 337 |
| | Bn-A¹-G-C-G¹ | |
| 4149-8_431 | Bn-MBn-A¹-C-Heg-G-Bn¹-Bn-A²-C-C3-C¹-G-C-G²-Nap-Bn²- | 338 |
| | Bn¹-A¹-Bn-A¹-G-C-G¹ | |
| 4149-8_432 | Bn-MBn-A¹-C-Heg-G-Bn¹-Bn-A²-C-C3-C¹-G-C-G²-Bn-Bn²-Bn¹- | 339 |
| | A¹-Bn-A¹-G-C-G¹ | |
| 4149-8_433 | Bn-MBn-A¹-C-Heg-G-Bn¹-Bn-A²-C-C3-C¹-G-C-G²-Nap-Bn-Bn¹- | 340 |
| | A¹-Bn-A¹-G-C-G¹ | |
| 4149-8_434 | Bn-MBn-A¹-C-Heg-G-Bn¹-Bn-A²-C-C3-C¹-G-C-G²-Bn-Bn-Bn¹- | 341 |
| | A¹-Bn-A¹-G-C-G¹ | |
| 4149-8_435 | Bn-Bn-A¹-C-Heg-G-Bn¹-Bn-A²-C-C3-C¹-G-C-G²-Nap-Bn²-Bn¹- | 342 |
| | A¹-Bn-A¹-G-C-G¹ | |
| 4149-8_436 | Bn-Bn-A¹-C-Heg-G-Bn¹-Bn-A²-C-C3-C¹-G-C-G²-Bn-Bn²-Bn¹-A¹- | 343 |
| | Bn-A¹-G-C-G¹ | |
| 4149-8_437 | Bn-Bn-A¹-C-Heg-G-Bn¹-Bn-A²-C-C3-C¹-G-C-G²-Nap-Bn-Bn¹-A¹- | 344 |
| | Bn-A¹-G-C-G¹ | |

No superscript indicates deoxyribose
Superscript o indicates 2′-fluoro
Superscript 1 indicates 2′-O-methyl
Superscript 2 indicates phosphorothioate (deoxyribose)
C3 = three carbon linker
Heg = hexaethylene glycol linker
Nap = naphthyl-dU
Pe = phenethyl-dU
BT = benzothiophenyl-dU
Th = thiophenyl-dU
Ib = isobutyl-dU
Trp = tryptaminyl-dU
2Nap = 2-naphthyl-dU
2NE = 2-naphthylethyl-dU
NE = naphthylethyl-dU
MBn = methylenedioxybenzyl-dU
PP = phenpropyl-dU
Tyr = tyrosyl-dU
FBn = fluorobenzyl-dU
Bn = benzyl-dU
3′-Doubler = Symmetric Doubler Phosphoramidite (Glen Research, Cat# 10-1920-02)

TABLE 1a
Homodimers of PDGF aptamer 4149-8_260 (SL5):

| | | | SOMAmer (2.5 nM) PDGF-BB | |
|---|---|---|---|---|
| | | | (1 nM) duplicates | |
| | | Ratio to | Relative PDGFRb | |
| SeqI | Kd (M) | 4149-8_38 | phosphorylation | |
| 4149-8_38 | 3.00E−11 | 1.0 | 5.4% | 3.6% |
| 4149-8_334 | 4.92E−11 | 1.6 | 1.7% | 1.7% |
| 4149-8_335 | 5.46E−11 | 1.8 | 1.5% | 1.5% |
| 4149-8_336 | 1.84E−11 | 0.61 | 1.7% | 2.3% |
| 4149-8_337 | 3.79E−12 | 0.1 | | |
| 4149-8_338 | 2.84E−11 | 0.93 | 1.4% | 1.3% |
| 4149-8_339 | 6.20E−12 | 0.2 | 2.7% | 3.6% |
| 3′DBLR | | | | |
| 4149-8_340 | 1.89E−11 | 0.6 | 1.7% | 3.2% |
| 3′DBLR | | | | |
| 4149-8_341 | 2.72E−11 | 0.9 | 1.5% | 1.9% |
| 3′DBLR | | | | |
| 4149-8_342 | 1.81E−11 | 0.6 | 1.6% | 1.5% |
| 3′DBLR | | | | |

TABLE 2
Sequences Representative of the Truncated
Variants with K_{d} values for PDGF of more than 10 nM

| Aptamer | | SEQ |
|---|---|---|
| ID. No. | Sequence (5′ → 3′) | ID NO. |
| 4149-8_14 | C-G-A-C-Bn-A-C-G-Bn-Bn-A-C-A-C-G-C-G-Bn-Bn-Bn-A-Bn-A- | 345 |
| | G-C-G-Bn-C-A-A-C-C-C-G-A-G-Bn-G-A-A-C-A | |
| 4149-8_15 | A-C-Bn-A-C-G-Bn-Bn-A-C-A-C-G-C-G-Bn-Bn-Bn-A-Bn-A-G-C- | 346 |
| | G-Bn-C-A-A-C-C-C-G-A-G-Bn-G-A-A-C-A | |
| 4149-8_16 | Bn-A-C-G-Bn-Bn-A-C-A-C-G-C-G-Bn-Bn-Bn-A-Bn-A-G-C-G- | 347 |
| | Bn-C-A-A-C-C-C-G-A-G-Bn-G-A-A-C-A | |
| 4149-8_17 | C-G-Bn-Bn-A-C-A-C-G-C-G-Bn-Bn-Bn-A-Bn-A-G-C-G-Bn-C-A- | 348 |
| | A-C-C-C-G-A-G-Bn-G-A-A-C-A | |
| 4149-8_18 | Bn-Bn-A-C-A-C-G-C-G-Bn-Bn-Bn-A-Bn-A-G-C-G-Bn-C-A-A-C- | 349 |
| | C-C-G-A-G-Bn-G-A-A-C-A | |
| 4149-8_19 | A-C-A-C-G-C-G-Bn-Bn-Bn-A-Bn-A-G-C-G-Bn-C-A-A-C-C-C-G- | 350 |
| | A-G-Bn-G-A-A-C-A | |
| 4149-8_33 | C-Bn-Bn-A-C-G-A-C-Bn-A-C-G-Bn-Bn-A-C-A-C-G-C-G-Bn-Bn- | 351 |
| | Bn-A-Bn-A | |
| 4149-8_34 | C-Bn-Bn-A-C-G-A-C-Bn-A-C-G-Bn-Bn-A-C-A-C-G-C-G-Bn-Bn- | 352 |
| | Bn-A-T | |
| 4149-8_35 | C-Bn-Bn-A-C-G-A-C-Bn-A-C-G-Bn-Bn-A-C-A-C-G-C-G-Bn-Bn- | 353 |
| | Bn-A | |
| 4149-8_41 | Bn-Bn-A-C-G-A-C-Bn-A-C-G-Bn-Bn-A-C-A-C-G-C-G-Bn-Bn-Bn- | 354 |
| | A-Bn-A | |
| 4149-8_42 | Bn-Bn-A-C-G-A-C-Bn-A-C-G-Bn-Bn-A-C-A-C-G-C-G-Bn-Bn-Bn- | 355 |
| | A-T | |
| 4149-8_43 | Bn-Bn-A-C-G-A-C-Bn-A-C-G-Bn-Bn-A-C-A-C-G-C-G-Bn-Bn-Bn- | 356 |
| | A | |
| 4149-8_65 | Bn-C3-A-C-G-A-C-Bn-A-C-G-Bn-Bn-A-C-A-C-G-C-G-Bn-Bn-Bn- | 357 |
| | A-Bn-A-G-C-G | |
| 4149-8_66 | Bn-Bn-C3-C-G-A-C-Bn-A-C-G-Bn-Bn-A-C-A-C-G-C-G-Bn-Bn- | 358 |
| | Bn-A-Bn-A-G-C-G | |
| 4149-8_74 | Bn-Bn-A-C-G-A-C-Bn-A-C-C3-Bn-Bn-A-C-A-C-G-C-G-Bn-Bn- | 359 |
| | Bn-A-Bn-A-G-C-G | |
| 4149-8_75 | Bn-Bn-A-C-G-A-C-Bn-A-C-G-C3-Bn-A-C-A-C-G-C-G-Bn-Bn-Bn- | 360 |
| | A-Bn-A-G-C-G | |
| 4149-8_76 | Bn-Bn-A-C-G-A-C-Bn-A-C-G-Bn-C3-A-C-A-C-G-C-G-Bn-Bn-Bn- | 361 |
| | A-Bn-A-G-C-G | |
| 4149-8_77 | Bn-Bn-A-C-G-A-C-Bn-A-C-G-Bn-Bn-C3-C-A-C-G-C-G-Bn-Bn- | 362 |
| | Bn-A-Bn-A-G-C-G | |
| 4149-8_81 | Bn-Bn-A-C-G-A-C-Bn-A-C-G-Bn-Bn-A-C-A-C-C3-C-G-Bn-Bn- | 363 |
| | Bn-A-Bn-A-G-C-G | |
| 4149-8_82 | Bn-Bn-A-C-G-A-C-Bn-A-C-G-Bn-Bn-A-C-A-C-G-C3-G-Bn-Bn- | 364 |
| | Bn-A-Bn-A-G-C-G | |
| 4149-8_83 | Bn-Bn-A-C-G-A-C-Bn-A-C-G-Bn-Bn-A-C-A-C-G-C-C3-Bn-Bn- | 365 |
| | Bn-A-Bn-A-G-C-G | |
| 4149-8_84 | Bn-Bn-A-C-G-A-C-Bn-A-C-G-Bn-Bn-A-C-A-C-G-C-G-C3-Bn-Bn- | 366 |
| | A-Bn-A-G-C-G | |
| 4149-8_85 | Bn-Bn-A-C-G-A-C-Bn-A-C-G-Bn-Bn-A-C-A-C-G-C-G-Bn-C3-Bn- | 367 |
| | A-Bn-A-G-C-G | |
| 4149-8_86 | Bn-Bn-A-C-G-A-C-Bn-A-C-G-Bn-Bn-A-C-A-C-G-C-G-Bn-Bn-C3- | 368 |
| | A-Bn-A-G-C-G | |
| 4149-8_88 | Bn-Bn-A-C-G-A-C-Bn-A-C-G-Bn-Bn-A-C-A-C-G-C-G-Bn-Bn-Bn- | 369 |
| | A-C3-A-G-C-G | |
| 4149-8_89 | Bn-Bn-A-C-G-A-C-Bn-A-C-G-Bn-Bn-A-C-A-C-G-C-G-Bn-Bn-Bn- | 370 |
| | A-Bn-C3-G-C-G | |
| 4149-8_90 | Bn-Bn-A-C-G-A-C-Bn-A-C-G-Bn-Bn-A-C-A-C-G-C-G-Bn-Bn-Bn- | 371 |
| | A-Bn-A-C3-C-G | |
| 4149-8_102 | Bn-Bn-A¹-C-G-C3-C-C3-C3-C-G-Bn-Bn-A-C-A¹-C-G-C-G-Bn-Bn- | 372 |
| | Bn-A-Bn-A¹-G-C-G¹ | |
| 4149-8_104 | Bn-U¹-A-C-G-A-C-Bn-A-C-G-Bn-Bn-A-C-A-C-G-C-G-Bn-Bn-Bn- | 373 |
| | A-Bn-A-G-C-G | |
| 4149-8_107 | Bn-Bn-A-C-G-A-C-Bn-A-C-G-Bn-U¹-A-C-A-C-G-C-G-Bn-Bn-Bn- | 374 |
| | A-Bn-A-G-C-G | |
| 4149-8_108 | Bn-Bn-A-C-G-A-C-Bn-A-C-G-Bn-Bn-A-C-A-C-G-C-G-U¹-Bn-Bn- | 375 |
| | A-Bn-A-G-C-G | |
| 4149-8_109 | Bn-Bn-A-C-G-A-C-Bn-A-C-G-Bn-Bn-A-C-A-C-G-C-G-Bn-U¹-Bn- | 376 |
| | A-Bn-A-G-C-G | |
| 4149-8_111 | Nap-Bn-A-C-G-A-C-Bn-A-C-G-Bn-Bn-A-C-A-C-G-C-G-Bn-Bn- | 377 |
| | Bn-A-U¹-A-G-C-G | |
| 4149-8_127 | Bn-Nap-A-C-Heg-Heg-G-U¹-Nap-A-C-A-C-G-C-G-Nap-Nap- | 378 |
| | Bn-A-Nap-A-G-C-G | |
| 4149-8_129 | Bn-Nap-A¹-C-Heg-Heg-G-U¹-Nap-A-C-A¹-C-G-C-G-Nap-Nap- | 379 |
| | Bn-A-Nap-A¹-G-C-G¹ | |
| 4149-8_134 | Bn-Bn-A-C-G-Bn-Bn-A-C-A-C-G-C-G-Bn-Bn-Bn-A-Bn-A-G-C-G | 380 |
| 4149-8_178 | Bn-Bn-A¹-C-Heg-G-Bn-Trp-A-C-A¹-C-G-C-G-Bn-Bn-Bn-A-Bn- | 381 |
| | A¹-G-C-G¹ | |
| 4149-8_179 | Bn-Bn-A¹-C-Heg-G-Bn-Bn-A-C-A¹-C-G-C-G-Trp-Bn-Bn-A-Bn- | 382 |
| | A¹-G-C-G¹ | |
| 4149-8_180 | Bn-Bn-A¹-C-Heg-G-Bn-Bn-A-C-A¹-C-G-C-G-Bn-Trp-Bn-A-Bn- | 383 |
| | A¹-G-C-G¹ | |
| 4149-8_186 | Bn-Bn-A¹-C-Heg-G-Bn-2Nap-A-C-A¹-C-G-C-G-Bn-Bn-Bn-A-Bn- | 384 |
| | A¹-G-C-G¹ | |
| 4149-8_196 | Bn-Bn-A¹-C-Heg-G-Bn-Bn-A-C-A¹-C-G-C-G-Bn-2NE-Bn-A-Bn- | 385 |
| | A¹-G-C-G¹ | |
| 4149-8_244 | Bn-Bn-A¹-C-Heg-G-Bn-Bn-A¹-C-A¹-C-G-C-G-Bn-Bn-Bn-A-Bn- | 386 |
| | A¹-G-C-G¹ | |
| 4149-8_250 | Tyr-MBn-A¹-C-Heg-G-FBn-Ib-A-C-A¹-C-G-C-G-2Nap-Pe-Th-A- | 387 |
| | NE-A¹-G-C-G¹ | |
| 4149-8_251 | Tyr-MBn-A¹-C-Heg-G-FBn-Ib-A-C-A¹-C¹-G-C-G-2Nap-Pe-Th- | 388 |
| | A¹-NE-A¹-G¹-C-G¹ | |
| 4149-8_252 | Trp-Ib-A¹-C-Heg-G-NE-Ib-A-C-A¹-C-G-C-G-Th-Pe-Th-A-MBn- | 389 |
| | A¹-G-C-G¹ | |
| 4149-8_253 | Trp-Ib-A¹-C-Heg-G-NE-Ib-A-C-A¹-C¹-G-C-G-Th-Pe-Th-A¹-MBn- | 390 |
| | A¹-G¹-C-G¹ | |
| 4149-8_258 | Bn-Bn-A¹-C-Heg-G-U¹-Ib-A-C-A¹-C-G-C-G-Bn-Bn-Bn-A-Bn-A¹- | 391 |
| | G-C-G¹ | |
| 4149-8_276 | Bn-Bn-A¹-C-Heg-G-FBn-Ib-A-C-A¹-C-G-C-G-Bn-Pe-Th-A-Bn- | 392 |
| | A¹-G-C-G¹ | |
| 4149-8_277 | Tyr-Bn-A¹-C-Heg-G-Bn-Ib-A-C-A¹-C-G-C-G-Bn-Pe-Th-A-Bn-A¹- | 393 |
| | G-C-G¹ | |
| 4149-8_278 | Tyr-Bn-A¹-C-Heg-G-FBn-Ib-A-C-A¹-C-G-C-G-2Nap-Pe-Th-A- | 394 |
| | Bn-A¹-G-C-G¹ | |
| 4149-8_304 | Bn-Bn-A¹-C-C3-G-Bn-Bn-A-C-C3--G-C-G-Bn-Bn-Bn-A-Bn-A¹- | 395 |
| | G-C-G¹ | |
| 4149-8_305 | Bn¹-Bn-A¹-C-Heg-G-Bn-Bn-A-C-A¹-C-G-C-G-Bn-Bn-Bn-A-Bn- | 396 |
| | A¹-G-C-G¹ | |
| 4149-8_306 | Bn-Bn¹-A¹-C-Heg-G-Bn-Bn-A-C-A¹-C-G-C-G-Bn-Bn-Bn-A-Bn- | 397 |
| | A¹-G-C-G¹ | |
| 4149-8_309 | Bn-Bn-A¹-C-Heg-G-Bn-Bn-A-C-A¹-C-G-C-G-Bn¹-Bn-Bn-A-Bn- | 398 |
| | A¹-G-C-G¹ | |
| 4149-8_310 | Bn-Bn-A¹-C-Heg-G-Bn-Bn-A-C-A¹-C-G-C-G-Bn-Bn¹-Bn-A-Bn- | 399 |
| | A¹-G-C-G¹ | |
| 4149-8_348 | Bn-Bn-A1-C-Heg-G-Bn1-Bn-A^{o}-C-A¹-C¹-G-C-G-Bn-Pe-Bn¹-A¹- | 400 |
| | Bn-A¹-G-C-G¹ | |
| 4149-8_350 | Bn-Bn-A¹-C-Heg-G-Bn¹-Bn-A-C^{o}-A¹-C¹-G-C-G-Bn-Pe-Bn¹-A¹- | 401 |
| | Bn-A¹-G-C-G¹ | |
| 4149-8_351 | Bn-Bn-A¹-C-Heg-G-Bn¹-Bn-A-C-A¹-C¹-G-C^{o}-G-Bn-Pe-Bn¹-A¹- | 402 |
| | Bn-A¹-G-C-G¹ | |
| 4149-8_364 | Bn-Bn-A¹-C-Heg-G-Bn-T-A-C-A¹-C-G-C-G-Bn-Bn-Bn-A-Bn-A¹- | 403 |
| | G-C-G¹ | |
| 4149-8_365 | Bn-Bn-A¹-C-Heg-G-Bn-Bn-A-C-A¹-C-G-C-G-T-Bn-Bn-A-Bn-A¹- | 404 |
| | G-C-G¹ | |
| 4149-8_366 | Bn-Bn-A¹-C-Heg-G-Bn-Bn-A-C-A¹-C-G-C-G-Bn-T-Bn-A-Bn-A¹- | 405 |
| | G-C-G¹ | |
| 4149-8_367 | Bn-Bn-A¹-C-Heg-G-Bn-Bn-A-C-A¹-C-G-C-G-Bn-Bn-T-A-Bn-A¹- | 406 |
| | G-C-G¹ | |
| 4149-8_368 | Bn-Bn-A¹-C-Heg-G-Bn-Bn-A-C-A¹-C-G-C-G-Bn-Bn-Bn-A-T-A¹- | 407 |
| | G-C-G¹ | |
| 4149-8_405 | Bn-Bn-A-C-Heg-G-Bn-Bn-A-C-C3-C-G-Bn-Bn-Bn-A-Bn-A-G | 408 |
| 4149-8_426 | Bn-MBn-A¹-C-Heg-G-Bn¹-Bn-A¹-C-C3-C¹-G-C-G¹-Bn-Bn-Bn¹- | 409 |
| | A¹-Bn-A¹-G-C-G¹ | |

No superscript indicates deoxyribose
Superscript o indicates 2′-fluoro
Superscript 1 indicates 2′-O-methyl
Superscript 2 indicates phosphorothioate (deoxyribose)
C3 = three carbon linker
Heg = hexaethylene glycol linker
Nap = naphthyl-dU
Pe = phenethyl-dU
BT = benzothiophenyl-dU
Th = thiophenyl-dU
Ib = isobutyl-dU
Trp = tryptaminyl-dU
2Nap = 2-naphthyl-dU
2NE = 2-naphthylethyl-dU
NE = naphthylethyl-dU
MBn = methylenedioxybenzyl-dU
PP = phenpropyl-dU
Tyr = tyrosyl-dU
FBn = fluorobenzyl-dU
Bn = benzyl-dU

TABLE 3
Truncations of PDGF aptamer Clone 4149-8_1.

| | | | | Seq. |
|---|---|---|---|---|
| Aptamer | Sequence | | K_{d} | ID. |
| ID. No. | (5′ → 3′) | Length | (nM) | NO. |
| 4149-8_2 | A-T-C-T-C-Z-Z-A-C- | 50 | 0.05 | 2 |
| | G-A-C-Z-A-C-G-Z-Z- | | | |
| | A-C-A-C-G-C-G-Z-Z- | | | |
| | Z-A-Z-A-G-C-G-Z-C- | | | |
| | A-A-C-C-C-G-A-G-Z- | | | |
| | G-A-A-C-A | | | |
| 4149-8_5 | A-T-C-T-C-Z-Z-A-C- | 46 | 0.02 | 4 |
| | G-A-C-Z-A-C-G-Z-Z- | | | |
| | A-C-A-C-G-C-G-Z-Z- | | | |
| | Z-A-Z-A-G-C-G-Z-C- | | | |
| | A-A-C-C-C-G-A-G-Z- | | | |
| | G | | | |
| 4149-8_7 | A-T-C-T-C-Z-Z-A-C- | 42 | 0.02 | 6 |
| | G-A-C-Z-A-C-G-Z-Z- | | | |
| | A-C-A-C-G-C-G-Z-Z- | | | |
| | Z-A-Z-A-G-C-G-Z-C- | | | |
| | A-A-C-C-C-G | | | |
| 4149-8_9 | A-T-C-T-C-Z-Z-A-C- | 38 | 0.03 | 8 |
| | G-A-C-Z-A-C-G-Z-Z- | | | |
| | A-C-A-C-G-C-G-Z-Z- | | | |
| | Z-A-Z-A-G-C-G-Z-C- | | | |
| | A-A | | | |
| 4149-8_10 | A-T-C-T-C-Z-Z-A-C- | 36 | 0.05 | 9 |
| | G-A-C-Z-A-C-G-Z-Z- | | | |
| | A-C-A-C-G-C-G-Z-Z- | | | |
| | Z-A-Z-A-G-C-G-Z-C | | | |
| 4149-8_11 | C-T-C-Z-Z-A-C-G-A- | 48 | 0.03 | 10 |
| | C-Z-A-C-G-Z-Z-A-C- | | | |
| | A-C-G-C-G-Z-Z-Z-A- | | | |
| | Z-A-G-C-G-Z-C-A-A- | | | |
| | C-C-C-G-A-G-Z-G-A- | | | |
| | A-C-A | | | |
| 4149-8_12 | C-Z-Z-A-C-G-A-C-Z- | 46 | 0.04 | 11 |
| | A-C-G-Z-Z-A-C-A-C- | | | |
| | G-C-G-Z-Z-Z-A-Z-A- | | | |
| | G-C-G-Z-C-A-A-C-C- | | | |
| | C-G-A-G-Z-G-A-A-C- | | | |
| | A | | | |
| 4149-8_13 | Z-A-C-G-A-C-Z-A-C- | 44 | 0.8 | 12 |
| | G-Z-Z-A-C-A-C-G-C- | | | |
| | G-Z-Z-Z-A-Z-A-G-C- | | | |
| | G-Z-C-A-A-C-C-C-G- | | | |
| | A-G-Z-G-A-A-C-A | | | |
| 4149-8_14 | C-G-A-C-Z-A-C-G-Z- | 42 | 13 | 345 |
| | Z-A-C-A-C-G-C-G-Z- | | | |
| | Z-Z-A-Z-A-G-C-G-Z- | | | |
| | C-A-A-C-C-C-G-A-G- | | | |
| | Z-G-A-A-C-A | | | |
| 4149-8_16 | Z-A-C-G-Z-Z-A-C-A- | 38 | 22 | 347 |
| | C-G-C-G-Z-Z-Z-A-Z- | | | |
| | A-G-C-G-Z-C-A-A-C- | | | |
| | C-C-G-A-G-Z-G-A-A- | | | |
| | C-A | | | |
| 4149-8_18 | Z-Z-A-C-A-C-G-C-G- | 34 | 13 | 349 |
| | Z-Z-Z-A-Z-A-G-C-G- | | | |
| | Z-C-A-A-C-C-C-G-A- | | | |
| | G-Z-G-A-A-C-A | | | |
| 4149-8_19 | A-C-A-C-G-C-G-Z-Z- | 32 | 74 | 350 |
| | Z-A-Z-A-G-C-G-Z-C- | | | |
| | A-A-C-C-C-G-A-G-Z- | | | |
| | G-A-A-C-A | | | |
| 4149-8_26 | C-Z-Z-A-C-G-A-C-Z- | 39 | 0.08 | 19 |
| | A-C-G-Z-Z-A-C-A-C- | | | |
| | G-C-G-Z-Z-Z-A-Z-A- | | | |
| | G-C-G-Z-C-A-A-C-C- | | | |
| | C-G-A | | | |
| 4149-8_27 | C-T-C-Z-Z-A-C-G-A- | 34 | 0.09 | 20 |
| | C-Z-A-C-G-Z-Z-A-C- | | | |
| | A-C-G-C-G-Z-Z-Z-A- | | | |
| | Z-A-G-C-G-Z-C | | | |
| 4149-8_29 | C-Z-Z-A-C-G-A-C-Z- | 31 | 0.07 | 22 |
| | A-C-G-Z-Z-A-C-A-C- | | | |
| | G-C-G-Z-Z-Z-A-Z-A- | | | |
| | G-C-G-T | | | |
| 4149-8_30 | C-Z-Z-A-C-G-A-C-Z- | 30 | 0.07 | 23 |
| | A-C-G-Z-Z-A-C-A-C- | | | |
| | G-C-G-Z-Z-Z-A-Z-A- | | | |
| | G-C-G | | | |
| 4149-8_31 | C-Z-Z-A-C-G-A-C-Z- | 29 | 0.30 | 24 |
| | A-C-G-Z-Z-A-C-A-C- | | | |
| | G-C-G-Z-Z-Z-A-Z-A- | | | |
| | G-C | | | |
| 4149-8_32 | C-Z-Z-A-C-G-A-C-Z- | 28 | 6 | 25 |
| | A-C-G-Z-Z-A-C-A-C- | | | |
| | G-C-G-Z-Z-Z-A-Z-A- | | | |
| | G | | | |
| 4149-8_33 | C-Z-Z-A-C-G-A-C-Z- | 27 | >1000 | 351 |
| | A-C-G-Z-Z-A-C-A-C- | | | |
| | G-C-G-Z-Z-Z-A-Z-A | | | |
| 4149-8_37 | Z-Z-A-C-G-A-C-Z-A- | 30 | 0.04 | 27 |
| | C-G-Z-Z-A-C-A-C-G- | | | |
| | C-G-Z-Z-Z-A-Z-A-G- | | | |
| | C-G-T | | | |
| 4149-8_38 | Z-Z-A-C-G-A-C-Z-A- | 29 | 0.05 | 28 |
| | C-G-Z-Z-A-C-A-C-G- | | | |
| | C-G-Z-Z-Z-A-Z-A-G- | | | |
| | C-G | | | |
| 4149-8_39 | Z-Z-A-C-G-A-C-Z-A- | 28 | .11 | 29 |
| | C-G-Z-Z-A-C-A-C-G- | | | |
| | C-G-Z-Z-Z-A-Z-A-G- | | | |
| | C | | | |
| 4149-8_40 | Z-Z-A-C-G-A-C-Z-A- | 27 | 1.5 | 30 |
| | C-G-Z-Z-A-C-A-C-G- | | | |
| | C-G-Z-Z-Z-A-Z-A-G | | | |
| 4149-8_41 | Z-Z-A-C-G-A-C-Z-A- | 26 | >1000 | 354 |
| | C-G-Z-Z-A-C-A-C-G- | | | |
| | C-G-Z-Z-Z-A-Z-A | | | |

TABLE 4
Data-collection, refinement and modelstatistics.

| Ligand | 4149-8_260 | | 4149-8_255 | |
|---|---|---|---|---|
| DATA | | | | |
| COLLECTION | | | | |
| Space group | P4₁2₁2 | | P4₁2₁2 | |
| Unit-cell | 59.10, | | 59.40, | |
| parameters: | 59.10, 167.01 | | 59.40 168.2 | |
| a, b, c (Å) | | | | |
| Wavelength (Å) | 0.97918 | | 0.97918 | |
| Resolution range | 50.0-2.20 | (2.26-2.20) | 50.0-2.30 | (2.36-2.30) |
| (Å) | | | | |
| Unique reflections | 15629 | | 13750 | |
| Completeness (%) | 96.8 | (99.1) | 97.2 | (98.4) |
| R_{merge} | 4.0 | (57.8) | 6.4 | (57.2) |
| Mean I/σ(I) | 25.3 | (3.4) | 19.3 | (2.6) |
| REFINEMENT | | | | |
| Resolution range | 50.0-2.20 | (2.26-2.20) | 50.0-2.30 | (2.36-2.30) |
| (Å) | | | | |
| R_{cryst} | 0.225 | (0.329) | 0.239 | (0.366) |
| R_{free} | 0.262 | (0.353) | 0.279 | (0.526) |
| R.m.s.d. bonds (Å) | 0.018 | | 0.018 | |
| R.m.s.d. angles (°) | 1.882 | | 2.017 | |
| Total atoms | 1382 | | 1355 | |
| Mean B factor (Å²) | 43.68 | | 43.86 | |
| Residues in favored | 98.9 | | 98.9 | |
| region (%) | | | | |
| Residues in allowed | 100.0 | | 100.0 | |
| region (%) | | | | |
| Molprobity score | 1.45 | (99^{th}) | 1.41 | (99^{th}) |
| (percentile) | | | | |

| | | |
|---|---|---|
| PDB ID | 4HQU | 4HQX |

Values in parenthesis indicate the values for the highest of twenty resolution shells
R_{merge} = ΣₕΣᵢ|Iᵢ(h) − <I(h)>|/ΣₕΣᵢIᵢ(h)
R_{free} = Σₕ||F_{obs}| − |F_{calc}||/Σₕ|F_{obs}|.
The free R factor was calculated using 5% of the reflections omitted from the refinement (The CCP4 suite: programs for protein crystallography, 1994).
*Ligand B-factors are for ligands in the active sites of the protein monomers. Ligands from solvent (PEG, glycerol, etc.) were not included in the calculation.

TABLE 5
Base-pair parameters for the PDGF BB aptamer compared to B-form DNA.

| Parameter | B-DNA | 5′Stem loop | | Miniknot S1 | | Miniknot S2 | |
|---|---|---|---|---|---|---|---|
| Complementary base-pair | | | | | | | |
| parameters | | | | | | | |
| Buckle (deg.) | 0.5_{(6.7)} | −5.67_{(7.90)} | | 0.32_{(22.8)} | | −0.74_{(15.3)} | |
| Propeller (deg.) | −11.4_{(5.3)} | −9.84_{(6.10)} | | 7.43_{(10.4)} | | 2.42_{(7.75)} | |
| Opening (deg.) | 0.60_{(3.1)} | −8.13_{(25.2)} | | 7.86_{(12.5)} | | 0.35_{(0.40)} | |
| Shear (Å) | 0.00_{(0.21)} | 1.12_{(1.42)} | | 1.29_{(2.52)} | | −0.03_{(0.42)} | |
| Stretch (Å) | −0.15_{(0.12)} | −0.38_{(0.66)} | | 1.96_{(3.55)} | | −0.12_{(0.42)} | |
| Stagger (Å) | 0.09_{(0.19)} | 0.04_{(0.61)} | | −0.45_{(0.69)} | | 0.28_{(0.05)} | |
| | | U2, A3/ | A3, C4/ | C10, A9/ | A9, U20/ | C12, G13/ | G13, C14/ |
| | | U7, U8 | G6, U7 | U16, G15 | U17, U16 | C23, G24 | G22, C23 |
| Base-pair step parameters | | | | | | | |
| Tilt (deg.) | −0.1_{(2.5)} | −0.80 | −1.45 | −4.65 | −5.83 | −2.39 | 3.86 |
| Roll (deg.) | 0.6_{(5.2)} | 0.34 | 0.55 | 6.12 | −5.64 | 4.19 | 3.94 |
| Twist (deg.) | 36_{(6.8)} | 24.1 | 33.3 | 25.3 | 15.9 | 29 | 33.9 |
| Shift (Å) | −0.02_{(0.45)} | 3.20 | −0.12 | −0.90 | −1.45 | −0.17 | 0.78 |
| Slide (Å) | 0.23_{(0.81)} | 0.25 | −0.24 | 0.27 | −4.49 | 0.21 | −0.4 |
| Rise (Å) | 3.32_{(0.19)} | 2.68 | 3.28 | 2.98 | 3.58 | 2.73 | 3.13 |
| Local helical parameters | | | | | | | |
| Inclination (deg.) | 2.1_{(9.2)} | 0.81 | 0.96 | 13.6 | −18.9 | 8.28 | 6.72 |
| Tip (deg.) | 0.0_{(4.3)} | 1.92 | 2.52 | 10.4 | 19.5 | 4.72 | −6.57 |
| Helical twist (deg.) | 36.5_{(6.6)} | 24.1 | 33.4 | 26.3 | 17.8 | 29.4 | 34.3 |
| x-displacement (Å) | 0.05_{(1.28)} | 0.52 | −0.5 | −0.97 | −9.84 | −0.34 | −1.28 |
| y-displacement (Å) | 0.02_{(0.87)} | −7.89 | −0.03 | 0.81 | −0.12 | −0.09 | −0.73 |
| Helical rise (Å) | 3.29_{(0.21)} | 2.58 | 3.28 | 3.07 | 5.08 | 2.73 | 3.13 |

TABLE 6
Truncations of PDGF aptamer clone 5169-4.

| Aptamer | Sequence | K_{d} | Seq. ID. |
|---|---|---|---|
| ID. No. | (5′ → 3′) | (nM) | NO. |
| 5169-4_3 | C-T-G-C-C-P-C-G-A- | 0.029 | 410 |
| | C-A-G-C-A-P-G-P-A- | | |
| | P-G-C-A-C-A-P-C-P- | | |
| | A-G-A-G-G-C-P-A-C- | | |
| | C-C-A-G-P-G-A-A-P- | | |
| | G-A-G-G-A | | |
| 5169-4_4 | C-C-P-C-G-A-C-A-G- | 0.027 | 411 |
| | C-A-P-G-P-A-P-G-C- | | |
| | A-C-A-P-C-P-A-G-A- | | |
| | G-G-C-P-A-C-C-C-A- | | |
| | G-A-A-A-A-A-A-A-A- | | |
| | A-A-A | | |
| 5169-4_5 | C-G-A-C-A-G-C-A-P- | 0.031 | 412 |
| | G-P-A-P-G-C-A-C-A- | | |
| | P-C-P-A-G-A-G-G-C- | | |
| | P-A-C-C-C-A-G-P-G- | | |
| | A-A-P-G-A-G-G-A | | |
| 5169-4_6 | C-A-G-C-A-P-G-P-A- | 67 | 413 |
| | P-G-C-A-C-A-P-C-P- | | |
| | A-G-A-G-G-C-P-A-C- | | |
| | C-C-A-G-P-G-A-A-P- | | |
| | G-A-G-G-A | | |
| 5169-4_7 | C-T-G-C-C-P-C-G-A- | 0.014 | 414 |
| | C-A-G-C-A-P-G-P-A- | | |
| | P-G-C-A-C-A-P-C-P- | | |
| | A-G-A-G-G-C-P-A-C- | | |
| | C-C-A-G-P-G-A-A-P- | | |
| | G-A | | |
| 5169-4_8 | C-T-G-C-C-P-C-G-A- | 0.036 | 415 |
| | C-A-G-C-A-P-G-P-A- | | |
| | P-G-C-A-C-A-P-C-P- | | |
| | A-G-A-G-G-C-P-A-C- | | |
| | C-C-A-G-P-G-A-A | | |
| 5169-4_9 | C-T-G-C-C-P-C-G-A- | 0.72 | 416 |
| | C-A-G-C-A-P-G-P-A- | | |
| | P-G-C-A-C-A-P-C-P- | | |
| | A-G-A-G-G-C-P-A-C- | | |
| | C-C-A-G-P | | |
| 5169-4_10 | C-T-G-C-C-P-C-G-A- | 0.63 | 417 |
| | C-A-G-C-A-P-G-P-A- | | |
| | P-G-C-A-C-A-P-C-P- | | |
| | A-G-A-G-G-C-P-A-C- | | |
| | C-C | | |
| 5169-4_11 | C-T-G-C-C-P-C-G-A- | 0.60 | 418 |
| | C-A-G-C-A-P-G-P-A- | | |
| | P-G-C-A-C-A-P-C-P- | | |
| | A-G-A-G-G-C-P-A | | |
| 5169-4_12 | C-G-A-C-A-G-C-A-P- | 0.064 | 419 |
| | G-P-A-P-G-C-A-C-A- | | |
| | P-C-P-A-G-A-G-G-C- | | |
| | P-A-C-C-C-A-G-P-G- | | |
| | A-A | | |
| 5169-4_13 | G-A-C-A-G-C-A-P-G- | 0.027 | 420 |
| | P-A-P-G-C-A-C-A-P- | | |
| | C-P-A-G-A-G-G-C-P- | | |
| | A-C-C-C-A-G-P-G-A- | | |
| | A | | |
| 5169-4_14 | A-C-A-G-C-A-P-G-P- | 0.17 | 421 |
| | A-P-G-C-A-C-A-P-C- | | |
| | P-A-G-A-G-G-C-P-A- | | |
| | C-C-C-A-G-P-G-A-A | | |
| 5169-4_15 | C-G-A-C-A-G-C-A-P- | 0.019 | 422 |
| | G-P-A-P-G-C-A-C-A- | | |
| | P-C-P-A-G-A-G-G-C- | | |
| | P-A-C-C-C-A-G-P-G- | | |
| | A | | |
| 5169-4_16 | C-G-A-C-A-G-C-A-P- | 0.016 | 423 |
| | G-P-A-P-G-C-A-C-A- | | |
| | P-C-P-A-G-A-G-G-C- | | |
| | P-A-C-C-C-A-G-P-G | | |
| 5169-4_17 | C-G-A-C-A-G-C-A-P- | 0.020 | 424 |
| | G-P-A-P-G-C-A-C-A- | | |
| | P-C-P-A-G-A-G-G-C- | | |
| | P-A-C-C-C-A-G-P | | |
| 5169-4_18 | C-G-A-C-A-G-C-A-P- | 0.026 | 425 |
| | G-P-A-P-G-C-A-C-A- | | |
| | P-C-P-A-G-A-G-G-C- | | |
| | P-A | | |
| 5169-4_19 | C-G-A-C-A-G-C-A-P- | 0.012 | 426 |
| | G-P-A-P-G-C-A-C-A- | | |
| | P-C-P-A-G-A-G-G-C- | | |
| | P | | |
| 5169-4_20 | C-G-A-C-A-G-C-A-P- | 0.014 | 427 |
| | G-P-A-P-G-C-A-C-A- | | |
| | P-C-P-A-G-A-G-G-C | | |
| 5169-4_21 | C-G-A-C-A-G-C-A-P- | 0.021 | 428 |
| | G-P-A-P-G-C-A-C-A- | | |
| | P-C-P-A-G-A-G-G | | |
| 5169-4_22 | C-G-A-C-A-G-C-A-P- | 0.015 | 429 |
| | G-P-A-P-G-C-A-C-A- | | |
| | P-C-P-A-G-A-G | | |
| 5169-4_23 | C-G-A-C-A-G-C-A-P- | 0.020 | 430 |
| | G-P-A-P-G-C-A-C-A- | | |
| | P-C-P-A-G-A | | |
| 5169-4_24 | C-G-A-C-A-G-C-A-P- | 0.021 | 431 |
| | G-P-A-P-G-C-A-C-A- | | |
| | P-C-P-A-G | | |
| 5169-4_25 | C-G-A-C-A-G-C-A-P- | 0.020 | 432 |
| | G-P-A-P-G-C-A-C-A- | | |
| | P-C-P-A | | |
| 5169-4_26 | C-G-A-C-A-G-C-A-P- | 0.017 | 433 |
| | G-P-A-P-G-C-A-C-A- | | |
| | P-C-P | | |
| 5169-4_27 | G-A-C-A-G-C-A-P-G- | 0.062 | 434 |
| | P-A-P-G-C-A-C-A-P- | | |
| | C-P-A-G-A | | |
| 5169-4_28 | G-A-C-A-G-C-A-P-G- | 0.048 | 435 |
| | P-A-P-G-C-A-C-A-P- | | |
| | C-P-A-G | | |
| 5169-4_29 | G-A-C-A-G-C-A-P-G- | 0.062 | 436 |
| | P-A-P-G-C-A-C-A-P- | | |
| | C-P-A | | |
| 5169-4_30 | G-A-C-A-G-C-A-P-G- | 0.062 | 437 |
| | P-A-P-G-C-A-C-A-P- | | |
| | C-P | | |
| 5169-4_32 | G-A-C-A-G-C-A-P-G- | 0.053 | 438 |
| | P-A-P-G-C-A-C-A-P- | | |
| | C-P-A-G-A-G | | |

TABLE 7
C3 spacer substitutions at
all positions in 5169-4_26.

| Aptamer | Sequence | K_{d} | Seq. ID. |
|---|---|---|---|
| ID. No. | (5′ → 3′) | (nM) | NO. |
| 5169-4_59 | C3-G-A-C-A-G-C-A-P- | 0.053 | 439 |
| | G-P-A-P-G-C-A-C-A- | | |
| | P-C-P | | |
| 5169-4_60 | C-C3-A-C-A-G-C-A-P- | 27 | 440 |
| | G-P-A-P-G-C-A-C-A- | | |
| | P-C-P | | |
| 5169-4_61 | C-G-C3-C-A-G-C-A-P- | NB | 441 |
| | G-P-A-P-G-C-A-C-A- | | |
| | P-C-P | | |
| 5169-4_62 | C-G-A-C3-A-G-C-A-P- | 42 | 442 |
| | G-P-A-P-G-C-A-C-A- | | |
| | P-C-P | | |
| 5169-4_63 | C-G-A-C-C3-G-C-A-P- | 29 | 443 |
| | G-P-A-P-G-C-A-C-A- | | |
| | P-C-P | | |
| 5169-4_64 | C-G-A-C-A-C3-C-A-P- | 0.054 | 444 |
| | G-P-A-P-G-C-A-C-A- | | |
| | P-C-P | | |
| 5169-4_65 | C-G-A-C-A-G-C3-A-P- | 0.074 | 445 |
| | G-P-A-P-G-C-A-C-A- | | |
| | P-C-P | | |
| 5169-4_66 | C-G-A-C-A-G-C-C3-P- | 8.5 | 446 |
| | G-P-A-P-G-C-A-C-A- | | |
| | P-C-P | | |
| 5169-4_67 | C-G-A-C-A-G-C-A-C3- | NB | 447 |
| | G-P-A-P-G-C-A-C-A- | | |
| | P-C-P | | |
| 5169-4_68 | C-G-A-C-A-G-C-A-P- | NB | 448 |
| | C3-P-A-P-G-C-A-C- | | |
| | A-P-C-P | | |
| 5169-4_69 | C-G-A-C-A-G-C-A-P- | NB | 449 |
| | G-C3-A-P-G-C-A-C- | | |
| | A-P-C-P | | |
| 5169-4_70 | C-G-A-C-A-G-C-A-P- | NB | 450 |
| | G-P-C3-P-G-C-A-C- | | |
| | A-P-C-P | | |
| 5169-4_71 | C-G-A-C-A-G-C-A-P- | NB | 451 |
| | G-P-A-C3-G-C-A-C- | | |
| | A-P-C-P | | |
| 5169-4_72 | C-G-A-C-A-G-C-A-P- | 230 | 452 |
| | G-P-A-P-C3-C-A-C- | | |
| | A-P-C-P | | |
| 5169-4_73 | C-G-A-C-A-G-C-A-P- | 0.015 | 453 |
| | G-P-A-P-G-C3-A-C- | | |
| | A-P-C-P | | |
| 5169-4_74 | C-G-A-C-A-G-C-A-P- | 0.37 | 454 |
| | G-P-A-P-G-C-C3-C- | | |
| | A-P-C-P | | |
| 5169-4_75 | C-G-A-C-A-G-C-A-P- | 0.14 | 455 |
| | G-P-A-P-G-C-A-C3- | | |
| | A-P-C-P | | |
| 5169-4_76 | C-G-A-C-A-G-C-A-P- | 1.3 | 456 |
| | G-P-A-P-G-C-A-C- | | |
| | C3-P-C-P | | |
| 5169-4_77 | C-G-A-C-A-G-C-A-P- | NB | 457 |
| | G-P-A-P-G-C-A-C- | | |
| | A-C3-C-P | | |
| 5169-4_78 | C-G-A-C-A-G-C-A-P- | 0.28 | 458 |
| | G-P-A-P-G-C-A-C- | | |
| | A-P-C3-P | | |
| 5169-4_79 | C-G-A-C-A-G-C-A-P- | NB | 459 |
| | G-P-A-P-G-C-A-C- | | |
| | A-P-C-C3 | | |

TABLE 8
2′O-methyl and deoxythymidine
substitutions in 5169-4_26.

| Aptamer | Sequence | K_{d} | Seq. |
|---|---|---|---|
| ID. No. | (5′ → 3′) | (nM) | ID. NO. |
| 5169-4_33 | C¹-G-A-C-A-G-C-A-P-G- | 0.027 | 460 |
| | P-A-P-G-C-A-C-A-P-C-P | | |
| 5169-4_34 | C-G-A-C¹-A-G-C-A-P-G- | 0.033 | 461 |
| | P-A-P-G-C-A-C-A-P-C-P | | |
| 5169-4_35 | C-G-A-C-A-G-C¹-A-P-G- | 0.016 | 462 |
| | P-A-P-G-C-A-C-A-P-C-P | | |
| 5169-4_36 | C-G-A-C-A-G-C-A-P-G- | 0.028 | 463 |
| | P-A-P-G-C¹-A-C-A-P-C-P | | |
| 5169-4_37 | C-G-A-C-A-G-C-A-P-G- | 0.041 | 464 |
| | P-A-P-G-C-A-C¹-A-P-C-P | | |
| 5169-4_38 | C-G-A-C-A-G-C-A-P-G- | 0.022 | 465 |
| | P-A-P-G-C-A-C-A-P-C¹-P | | |
| 5169-4_39 | C-G¹-A-C-A-G-C-A-P-G- | 0.058 | 466 |
| | P-A-P-G-C-A-C-A-P-C-P | | |
| 5169-4_40 | C-G-A-C-A-G¹-C-A-P-G- | 0.024 | 467 |
| | P-A-P-G-C-A-C-A-P-C-P | | |
| 5169-4_41 | C-G-A-C-A-G-C-A-P-G¹- | 0.097 | 468 |
| | P-A-P-G-C-A-C-A-P-C-P | | |
| 5169-4_42 | C-G-A-C-A-G-C-A-P-G- | 0.0069 | 469 |
| | P-A-P-G¹-C-A-C-A-P-C-P | | |
| 5169-4_43 | C-G-A¹-C-A-G-C-A-P-G- | 0.16 | 470 |
| | P-A-P-G-C-A-C-A-P-C-P | | |
| 5169-4_44 | C-G-A-C-A¹-G-C-A-P-G- | 0.53 | 471 |
| | P-A-P-G-C-A-C-A-P-C-P | | |
| 5169-4_45 | C-G-A-C-A-G-C-A¹-P-G- | 0.93 | 472 |
| | P-A-P-G-C-A-C-A-P-C-P | | |
| 5169-4_46 | C-G-A-C-A-G-C-A-P-G- | 0.093 | 473 |
| | P-A¹-P-G-C-A-C-A-P-C-P | | |
| 5169-4_47 | C-G-A-C-A-G-C-A-P-G- | 0.016 | 474 |
| | P-A-P-G-C-A¹-C-A-P-C-P | | |
| 5169-4_48 | C-G-A-C-A-G-C-A-P-G- | 0.014 | 475 |
| | P-A-P-G-C-A-C-A¹-P-C-P | | |
| 5169-4_49 | C-G-A-C-A-G-C-A-P¹-G- | 0.53 | 476 |
| | P-A-P-G-C-A-C-A-P-C-P | | |
| 5169-4_50 | C-G-A-C-A-G-C-A-P-G- | 0.047 | 477 |
| | P¹-A-P-G-C-A-C-A-P-C-P | | |
| 5169-4_51 | C-G-A-C-A-G-C-A-P-G- | 0.32 | 478 |
| | P-A-P¹-G-C-A-C-A-P-C-P | | |
| 5169-4_52 | C-G-A-C-A-G-C-A-P-G- | 0.31 | 479 |
| | P-A-P-G-C-A-C-A-P¹-C-P | | |
| 5169-4_53 | C-G-A-C-A-G-C-A-P-G- | 0.022 | 480 |
| | P-A-P-G-C-A-C-A-P-C-P¹ | | |
| 5169-4_54 | C-G-A-C-A-G-C-A-T-G- | 44 | 481 |
| | P-A-P-G-C-A-C-A-P-C-P | | |
| 5169-4_55 | C-G-A-C-A-G-C-A-P-G- | 7.8 | 482 |
| | T-A-P-G-C-A-C-A-P-C-P | | |
| 5169-4_56 | C-G-A-C-A-G-C-A-P-G- | NB | 483 |
| | P-A-T-G-C-A-C-A-P-C-P | | |
| 5169-4_57 | C-G-A-C-A-G-C-A-P-G- | 120 | 484 |
| | P-A-P-G-C-A-C-A-T-C-P | | |
| 5169-4_58 | C-G-A-C-A-G-C-A-P-G- | NB | 485 |
| | P-A-P-G-C-A-C-A-P-C-T | | |

TABLE 9
Multiple 2′-O-methyl substitutions
in PDGF aptamer 5169-4_26.

| Aptamer | Sequence | K_{d} | Seq. |
|---|---|---|---|
| ID. No. | (5′ → 3′) | (nM) | ID. NO. |
| 5169-4_80 | C-G-A-C-A-G-C¹-A- | 0.0061 | 486 |
| | P-G-P-A-P-G-C-A¹- | | |
| | C-A¹-P-C-P | | |
| 5169-4_81 | C-G-A-C-A-G-C¹-A- | 0.0049 | 487 |
| | P-G-P-A-P-G¹-C-A¹- | | |
| | C-A¹-P-C-P | | |
| 5169-4_82 | C-G-A-C-A-G¹-C¹-A- | 0.0016 | 488 |
| | P-G-P-A-P-G¹-C-A¹- | | |
| | C-A¹-P-C¹-P¹ | | |
| 5169-4_83 | C¹-G-A-C-A-G¹-C¹- | 0.0021 | 489 |
| | A-P-G-P-A-P-G¹- | | |
| | C¹-A¹-C-A¹-P-C¹-P¹ | | |
| 5169-4_84 | C¹-G-A-C¹-A-G¹-C¹- | 0.0053 | 490 |
| | A-P-G-P-A-P-G¹- | | |
| | C¹-A¹-C-A¹-P-C¹-P¹ | | |
| 5169-4_85 | C¹-G-A-C¹-A-G¹-C¹- | 0.0062 | 491 |
| | A-P-G-P¹-A-P-G¹- | | |
| | C¹-A¹-C¹-A¹-P-C¹-P¹ | | |
| 5169-4_86 | C¹-G¹-A-C¹-A-G¹-C¹- | 0.064 | 492 |
| | A-P-G-P¹-A-P-G¹- | | |
| | C¹-A¹-C¹-A¹-P-C¹-P¹ | | |
| 5169-4_87 | C¹-G¹-A-C¹-A-G¹-C¹- | NB | 493 |
| | A-P-G¹-P¹-A¹-P-G¹- | | |
| | C¹-A¹-C¹-A¹-P-C¹-P¹ | | |
| 5169-4_88 | C¹-G¹-A¹-C¹-A-G¹-C¹- | NB | 494 |
| | A-P-G¹-P¹-A¹-P-G¹- | | |
| | C¹-A¹-C¹-A¹-P-C¹-P¹ | | |
| 5169-4_89 | C¹-G¹-A¹-C¹-A-G¹-C¹- | NB | 495 |
| | A-P-G¹-P¹-A¹-P¹-G¹- | | |
| | C¹-A¹-C¹-A¹-P¹-C¹-P¹ | | |
| 5169-4_90 | C¹-G¹-A¹-C¹-A¹-G¹- | NB | 496 |
| | C¹-A-P¹-G¹-P¹-A¹- | | |
| | P¹-G¹-C¹-A¹-C¹-A¹- | | |
| | P¹-C¹-P¹ | | |
| 5169-4_91 | C¹-G¹-A¹-C¹-A¹-G¹- | NB | 497 |
| | C¹-A¹-P¹-G¹-P¹-A¹- | | |
| | P¹-G¹-C¹-A¹-C¹-A¹- | | |
| | P¹-C¹-P¹ | | |
| 5169-4_92 | C¹-G-A-C-A-G-C¹- | 0.0052 | 498 |
| | A-P-G-P-A-P-G-C¹- | | |
| | A¹-C-A¹-P-C¹-P¹ | | |
| 5169-4_105 | C-G-A-C-A-G¹-C-A- | 0.0061 | 499 |
| | P-G-P-A-P-G-C-A- | | |
| | C-A¹-P-C¹-P | | |
| 5169-4_106 | C¹-G-A-C-A-G-C-A- | 0.016 | 517 |
| | P-G-P-A-P-G-C-A- | | |
| | C-A¹-P-C¹-P | | |
| 5169-4_107 | C¹-G-A-C-A-G¹-C- | 0.013 | 518 |
| | A-P-G-P-A-P-G-C- | | |
| | A-C-A¹-P-C-P | | |
| 5169-4_108 | C¹-G-A-C-A-G¹-C- | 0.012 | 519 |
| | A-P-G-P-A-P-G¹-C- | | |
| | A-C-A-P-C-P | | |
| 5169-4_109 | C¹-G-A-C-A-G¹-C- | 0.011 | 520 |
| | A-P-G-P-A-P-G-C- | | |
| | A¹-C-A-P-C-P | | |
| 5169-4_110 | C¹-G-A-C-A-G-C- | 0.0050 | 521 |
| | A-P-G-P-A-P-G¹- | | |
| | C-A¹-C-A-P-C-P | | |
| 5169-4_111 | C-G-A-C-A-G-C¹- | 0.0048 | 522 |
| | A-P-G-P-A-P-G¹- | | |
| | C-A¹-C-A-P-C-P | | |
| 5169-4_112 | C-G-A-C-A-G-C- | 0.0062 | 523 |
| | A-P-G-P-A-P-G¹- | | |
| | C-A¹-C-A-P-C-P¹ | | |
| 5169-4_113 | C-G-A-C-A-G-C¹- | 0.012 | 524 |
| | A-P-G-P-A-P-G- | | |
| | C-A¹-C-A-P-C-P¹ | | |
| 5169-4_114 | C-G-A-C-A-G-C¹- | 0.038 | 525 |
| | A-P-G-P-A-P-G- | | |
| | C-A-C¹-A-P-C-P¹ | | |
| 5169-4_115 | C-G-A-C¹-A-G-C¹- | 0.024 | 526 |
| | A-P-G-P-A-P-G- | | |
| | C-A-C-A-P-C-P¹ | | |
| 5169-4_116 | C-G-A-C¹-A-G-C- | 0.093 | 527 |
| | A-P-G-P-A-P-G- | | |
| | C-A-C¹-A-P-C-P¹ | | |
| 5169-4_117 | C-G-A-C¹-A-G-C- | 0.71 | 528 |
| | A-P-G-P-A¹-P-G- | | |
| | C-A-C¹-A-P-C-P | | |
| 5169-4_118 | C-G¹-A-C¹-A-G-C- | 0.56 | 529 |
| | A-P-G-P-A-P-G-C- | | |
| | A-C¹-A-P-C-P | | |
| 5169-4_119 | C-G¹-A-C¹-A-G-C- | NB | 530 |
| | A-P-G-P-A-P-G-C- | | |
| | A-C¹-A-P-C-P | | |
| 5169-4_120 | C-G¹-A-C-A-G-C- | NB | 531 |
| | A-P-G-P-A¹-P-G- | | |
| | C¹-A-C-A-P-C-P | | |
| 5169-4_121 | C-G¹-A-C-A-G-C- | NB | 532 |
| | A-P-G¹-P-A¹-P-G- | | |
| | C-A-C-A-P-C-P | | |
| 5169-4_122 | C-G¹-A-C-A-G-C- | NB | 533 |
| | A-P-G¹-P-A-P-G- | | |
| | C¹-A-C-A-P-C-P | | |
| 5169-4_123 | C¹-G-A-C-A-G-C- | 0.030 | 534 |
| | A-P-G-P-A-P-G- | | |
| | C-A-C-A-P-C¹-P¹ | | |
| 5169-4_124 | C-G-A-C-A¹-G-C- | 0.60 | 535 |
| | A-P-G-P-A-P-G- | | |
| | C-A-C-A-P-C¹-P¹ | | |
| 5169-4_125 | C¹-G-A-C-A¹-G-C- | 1.0 | 536 |
| | A-P-G-P-A-P-G- | | |
| | C-A-C-A-P-C¹-P | | |
| 5169-4_126 | C-G-A-C-A-G-C- | NB | 537 |
| | A-P-G-P-A-P-G- | | |
| | C-A-C-A-P¹-C¹-P¹ | | |
| 5169-4_127 | C-G-A-C-A-G-C- | 0.010 | 538 |
| | A-P-G-P-A-P-G- | | |
| | C-A¹-C¹-A¹-P-C-P | | |
| 5169-4_128 | C-G-A-C-A-G-C- | 0.099 | 539 |
| | A-P-G-P-A-P¹-G¹- | | |
| | C¹-A-C-A-P-C-P | | |
| 5169-4_129 | C-G-A-C-A-G-C- | NB | 540 |
| | A-P-G¹-P¹-A¹-P- | | |
| | G-C-A-C-A-P-C-P | | |
| 5169-4_130 | C-G-A-C-A-G-C¹- | 4.5 | 541 |
| | A¹-P¹-G-P-A-P-G- | | |
| | C-A-C-A-P-C-P | | |
| 5169-4_131 | C-G-A-C¹-A¹-G¹- | 0.64 | 542 |
| | C-A-P-G-P-A-P- | | |
| | G-C-A-C-A-P-C-P | | |
| 5169-4_132 | C¹-G¹-A¹-C-A-G- | 0.42 | 543 |
| | C-A-P-G-P-A-P- | | |
| | G-C-A-C-A-P-C-P | | |
| 5169-4_144 | C¹-G-A-C-A-G-C¹- | 0.00050 | 544 |
| | A-P-G-P-A-P-G¹- | | |
| | C-A¹-C-A¹-P-C-P¹ | | |
| 5169-4_146 | C¹-G-A-C¹-A-G¹-C¹- | 0.00060 | 545 |
| | A-P-G-P-AP-G¹-C¹- | | |
| | A¹-C¹-A¹-P-C¹-P¹ | | |

TABLE 10
Truncations of VEGF aptamer Clone 4867-31.

| | | | | | | Seq. |
|---|---|---|---|---|---|---|
| Aptamer | | Sequence | K_{d} (nM) | K_{d} (nM) | K_{d} (nM) | ID. |
| ID. No. | length | (5′ → 3′) | hVEGF165 | rVEGF164 | hVEGF121 | NO. |
| OH-4867- | 38 | T-C-A-A-P-C-A-G-C-C-G-P-P- | 0.26 | 0.54 | 0.82 | 546 |
| 31_22 | | C-A-A-G-P-G-C-P-P-G-P-A-G- | | | | |
| | | G-A-P-P-P-A-A-A-P-G-G-A | | | | |
| OH-4867- | 37 | T-C-A-A-P-C-A-G-C-C-G-P-P- | 0.30 | 0.66 | 1.3 | 547 |
| 31_23 | | C-A-A-G-P-G-C-P-P-G-P-A-G- | | | | |
| | | G-A-P-P-P-A-A-A-P-G-G | | | | |
| OH-4867- | 36 | T-C-A-A-P-C-A-G-C-C-G-P-P- | 2.8 | 4.2 | 36 | 548 |
| 31_24 | | C-A-A-G-P-G-C-P-P-G-P-A-G- | | | | |
| | | G-A-P-P-P-A-A-A-P-G | | | | |
| OH-4867- | 35 | T-C-A-A-P-C-A-G-C-C-G-P-P- | 26 | 16 | 70 | 549 |
| 31_25 | | C-A-A-G-P-G-C-P-P-G-P-A-G- | | | | |
| | | G-A-A-P-P-P-A-A-A-P | | | | |
| OH-4867- | 39 | C-A-A-P-C-A-G-C-C-G-P-P-C- | 0.075 | 0.07 | 0.49 | 550 |
| 31-26 | | A-A-G-P-G-C-P-P-G-P-A-G-G- | | | | |
| | | A-P-P-P-A-A-A-P-G-G-A-A-P | | | | |
| OH-4867- | 38 | A-A-P-C-A-G-C-C-G-P-P-C-A- | 0.11 | 0.07 | 0.59 | 551 |
| 31-27 | | A-G-P-G-C-P-P-G-P-A-G-G-A- | | | | |
| | | P-P-P-A-A-A-P-G-G-A-A-P | | | | |
| OH-4867- | 37 | A-P-C-A-G-C-C-G-P-P-C-A-A- | 0.10 | 0.07 | 0.97 | 552 |
| 31-28 | | G-P-G-C-P-P-G-P-A-G-G-A-P- | | | | |
| | | P-P-A-A-A-P-G-G-A-A-P | | | | |
| OH-4867- | 36 | P-C-A-G-C-C-G-P-P-C-A-A-G- | 0.13 | 0.08 | 0.96 | 553 |
| 31-29 | | P-G-C-P-P-G-P-A-G-G-A-P-P- | | | | |
| | | P-A-A-A-P-G-G-A-A-P | | | | |
| OH-4867- | 35 | C-A-G-C-C-G-P-P-C-A-A-G-P- | 0.20 | 0.15 | 1.4 | 554 |
| 31-30 | | G-C-P-P-G-P-A-G-G-A-P-P-P- | | | | |
| | | A-A-A-A-P-G-G-A-A-P | | | | |
| OH-4867- | 34 | A-G-C-C-G-P-P-C-A-A-G-P-G- | 0.17 | 0.12 | 1.0 | 555 |
| 31-31 | | C-P-P-G-P-A-G-G-A-P-P-P-A- | | | | |
| | | A-A-P-G-G-A-A-P | | | | |
| OH-4867- | 38 | C-A-A-P-C-A-G-C-C-G-P-P-C- | 0.10 | 0.06 | 0.51 | 556 |
| 31-32 | | A-A-G-P-G-C-P-P-G-P-A-G-G- | | | | |
| | | A-P-P-P-A-A-A-P-G-G-A-A | | | | |
| OH-4867- | 37 | A-A-P-C-A-G-C-C-G-P-P-C-A- | 0.11 | 0.04 | 0.55 | 557 |
| 31-33 | | A-G-P-G-C-P-P-G-P-A-G-G-A- | | | | |
| | | P-P-P-A-A-A-P-G-G-A-A | | | | |
| OH-4867- | 36 | A-P-C-A-G-C-C-G-P-P-C-A-A- | 0.35 | 0.05 | 0.47 | 558 |
| 31-34 | | G-P-G-C-P-P-G-P-A-G-G-A-P- | | | | |
| | | P-P-A-A-A-P-G-G-A-A | | | | |
| OH-4867- | 35 | P-C-A-G-C-C-G-P-P-C-A-A-G- | 0.11 | 0.05 | flat | 559 |
| 31-35 | | P-G-C-P-P-G-P-A-G-G-A-P-P- | | | | |
| | | P-A-A-A-P-G-G-A-A | | | | |
| OH-4867- | 34 | C-A-G-C-C-G-P-P-C-A-A-G-P- | 0.11 | 0.06 | 0.39 | 560 |
| 31-36 | | G-C-P-P-G-P-A-G-G-A-P-P-P- | | | | |
| | | A-A-A-P-G-G-A-A | | | | |
| OH-4867- | 33 | A-G-C-C-G-P-P-C-A-A-G-P-G- | 0.092 | 0.04 | 0.21 | 561 |
| 31-37 | | C-P-P-G-P-A-G-G-A-P-P-P-A- | | | | |
| | | A-A-P-G-G-A-A | | | | |
| OH-4867- | 37 | C-A-A-P-C-A-G-C-C-G-P-P-C- | 0.17 | 0.09 | 0.81 | 562 |
| 31-38 | | A-A-G-P-G-C-P-P-G-P-A-G-G- | | | | |
| | | A-P-P-P-A-A-A-P-G-G-A | | | | |
| OH-4867- | 36 | A-A-P-C-A-G-C-C-G-P-P-C-A- | 0.20 | 0.09 | 0.62 | 563 |
| 31-39 | | A-G-P-G-C-P-P-G-P-A-G-G-A- | | | | |
| | | P-P-P-A-A-A-P-G-G-A | | | | |
| OH-4867- | 35 | A-P-C-A-G-C-C-G-P-P-C-A-A- | 0.14 | 0.10 | 0.70 | 564 |
| 31-40 | | G-P-G-C-P-P-G-P-A-G-G-A-P- | | | | |
| | | P-P-A-A-A-P-G-G-A | | | | |
| OH-4867- | 34 | P-C-A-G-C-C-G-P-P-C-A-A-G- | 0.13 | 0.08 | 0.63 | 565 |
| 31-41 | | P-G-C-P-P-G-P-A-G-G-A-P-P- | | | | |
| | | P-A-A-A-P-G-G-A | | | | |
| OH-4867- | 33 | C-A-G-C-C-G-P-P-C-A-A-G-P- | 0.071 | 0.05 | 0.20 | 566 |
| 31-42 | | G-C-P-P-G-P-A-G-G-A-P-P-P- | | | | |
| | | A-A-A-P-G-G-A | | | | |
| OH-4867- | 32 | A-G-C-C-G-P-P-C-A-A-G-P-G- | 0.050 | 0.05 | 0.29 | 567 |
| 31-43 | | C-P-P-G-P-A-G-G-A-P-P-P-A- | | | | |
| | | A-A-P-G-G-A | | | | |
| OH-4867- | 32 | C-A-G-C-C-G-P-P-C-A-A-G-P- | 0.13 | 0.38 | 0.14 | 568 |
| 31-44 | | G-C-P-P-G-P-A-G-G-A-P-P-P- | | | | |
| | | A-A-A-P-G-G | | | | |
| OH-4867- | 31 | C-A-G-C-C-G-P-P-C-A-A-G-P- | 1.1 | 4.5 | 3.3 | 569 |
| 31-45 | | G-C-P-P-G-P-A-G-G-A-P-P-P- | | | | |
| | | A-A-A-P-G | | | | |
| OH-4867- | 30 | C-A-G-C-C-G-P-P-C-A-A-G-P- | 5.9 | 9.6 | NB | 570 |
| 31-46 | | G-C-P-P-G-P-A-G-G-A-P-P-P- | | | | |
| | | A-A-A-P | | | | |
| OH-4867- | 29 | C-A-G-C-C-G-P-P-C-A-A-G-P- | NB | 83 | NB | 571 |
| 31-47 | | G-C-P-P-G-P-A-G-G-A-P-P-P- | | | | |
| | | A-A-A | | | | |
| OH-4867- | 28 | C-A-G-C-C-G-P-P-C-A-A-G-P- | NB | 142 | NB | 572 |
| 31-48 | | G-C-P-P-G-P-A-G-G-A-P-P-P- | | | | |
| | | A-A | | | | |
| OH-4867- | 27 | C-A-G-C-C-G-P-P-C-A-A-G-P- | NB | NB | NB | 573 |
| 31-49 | | G-C-P-P-G-P-A-G-G-A-P-P-P- | | | | |
| | | A | | | | |
| OH-4867- | 26 | C-A-G-C-C-G-P-P-C-A-A-G-P- | NB | NB | NB | 574 |
| 31-50 | | G-C-P-P-G-P-A-G-G-A-P-P-P | | | | |
| OH-4867- | 31 | A-G-C-C-G-P-P-C-A-A-G-P-G- | 0.11 | 0.074 | 0.20 | 575 |
| 31-51 | | C-P-P-G-P-A-G-G-A-P-P-P-A- | | | | |
| | | A-A-P-G-G | | | | |
| OH-4867- | 30 | A-G-C-C-G-P-P-C-A-A-G-P-G- | 0.17 | 0.58 | 2.8 | 576 |
| 31-52 | | C-P-P-G-P-A-G-G-A-P-P-P-A- | | | | |
| | | A-A-P-G | | | | |
| OH-4867- | 29 | A-G-C-C-G-P-P-C-A-A-G-P-G- | 3.2 | NB | 19 | 577 |
| 31-53 | | C-P-P-G-P-A-G-G-A-P-P-P-A- | | | | |
| | | A-A-P | | | | |
| OH-4867- | 28 | A-G-C-C-G-P-P-C-A-A-G-P-G- | NB | NB | NB | 578 |
| 31-54 | | C-P-P-G-P-A-G-G-A-P-P-P-A- | | | | |
| | | A-A | | | | |
| OH-4867- | 27 | A-G-C-C-G-P-P-C-A-A-G-P-G- | NB | NB | NB | 579 |
| 31-55 | | C-P-P-G-P-A-G-G-A-P-P-P-A- | | | | |
| | | A | | | | |
| OH-4867- | 26 | A-G-C-C-G-P-P-C-A-A-G-P-G- | NB | NB | NB | 580 |
| 31-56 | | C-P-P-G-P-A-G-G-A-P-P-P-A | | | | |
| OH-4867- | 25 | A-G-C-C-G-P-P-C-A-A-G-P-G- | NB | NB | NB | 581 |
| 31-57 | | C-P-P-G-P-A-G-G-A-P-P-P | | | | |
| OH-4867- | 31 | G-C-C-G-P-P-C-A-A-G-P-G-C- | 0.10 | 0.21 | 0.15 | 582 |
| 31-58 | | P-P-G-P-A-G-G-A-P-P-P-A-A- | | | | |
| | | A-P-G-G-A | | | | |
| OH-4867- | 30 | C-C-G-P-P-C-A-A-G-P-G-C-P- | 0.16 | 0.20 | 0.14 | 583 |
| 31-59 | | P-G-P-A-G-G-A-P-P-P-A-A-A- | | | | |
| | | P-G-G-A | | | | |
| OH-4867- | 29 | C-G-P-P-C-A-A-G-P-G-C-P-P- | 0.61 | 1.4 | 2.2 | 584 |
| 31-60 | | G-P-A-G-G-A-P-P-P-A-A-A-P- | | | | |
| | | G-G-A | | | | |
| OH-4867- | 28 | G-P-P-C-A-A-G-P-G-C-P-P-G- | 2.9 | 13 | 33 | 585 |
| 31-61 | | P-A-G-G-A-P-P-P-A-A-A-P-G- | | | | |
| | | G-A | | | | |
| OH-4867- | 29 | C-C-G-P-P-C-A-A-G-P-G-C-P- | | | 0.17 | 586 |
| 31_143 | | P-G-P-A-G-G-A-P-P-P-A-A-A- | | | | |
| | | P-G-G | | | | |
| OH-4867- | 30 | G-C-C-G-P-P-C-A-A-G-P-G-C- | | | 0.20 | 587 |
| 31_144 | | P-P-G-P-A-G-G-A-P-P-P-A-A- | | | | |
| | | A-P-G-G | | | | |

TABLE 11
C3 spacer substitutions
at all positions in 4867-15_2.

| | | | ratio | Seq. |
|---|---|---|---|---|
| Aptamer | Sequence | K_{d} | to | ID. |
| ID. No. | 5′ → 3′ | (nM) | parent | NO. |
| OH-4867- | C-C-C-T-C-C-A-P-C-A- | 0.15 | 1 | 588 |
| 31-2 | G-C-C-G-P-P-C-A-A-G- | | | |
| | P-G-C-P-P-G-P-A-G-G- | | | |
| | A-P-P-P-A-A-A-P-G-G- | | | |
| | A-A-P-P-G-G-A-G-G-A | | | |
| OH-4867- | V-C-C-T-C-C-A-P-C-A- | 0.11 | 0.72 | 589 |
| 15-24 | G-C-C-G-P-P-C-A-A-G- | | | |
| | P-G-C-P-P-G-P-A-G-G- | | | |
| | A-P-P-P-A-A-A-P-G-G- | | | |
| | A-A-P-P-G-G-A-G-G-A | | | |
| OH-4867- | C-V-C-T-C-C-A-P-C-A- | 0.13 | 0.84 | 590 |
| 15-25 | G-C-C-G-P-P-C-A-A-G- | | | |
| | P-G-C-P-P-G-P-A-G-G- | | | |
| | A-P-P-P-A-A-A-P-G-G- | | | |
| | A-A-P-P-G-G-A-G-G-A | | | |
| OH-4867- | C-C-V-T-C-C-A-P-C-A- | 0.20 | 1.3 | 591 |
| 15-26 | G-C-C-G-P-P-C-A-A-G- | | | |
| | P-G-C-P-P-G-P-A-G-G- | | | |
| | A-P-P-P-A-A-A-P-G-G- | | | |
| | A-A-P-P-G-G-A-G-G-A | | | |
| OH-4867- | C-C-C-V-C-C-A-P-C-A- | 0.40 | 2.7 | 592 |
| 15-27 | G-C-C-G-P-P-C-A-A-G- | | | |
| | P-G-C-P-P-G-P-A-G-G- | | | |
| | A-P-P-P-A-A-A-P-G-G- | | | |
| | A-A-P-P-G-G-A-G-G-A | | | |
| OH-4867- | C-C-C-T-V-C-A-P-C-A- | 0.34 | 2.3 | 593 |
| 15-28 | G-C-C-G-P-P-C-A-A-G- | | | |
| | P-G-C-P-P-G-P-A-G-G- | | | |
| | A-P-P-P-A-A-A-P-G-G- | | | |
| | A-A-P-P-G-G-A-G-G-A | | | |
| OH-4867- | C-C-C-T-C-V-A-P-C-A- | 0.20 | 1.4 | 594 |
| 15-29 | G-C-C-G-P-P-C-A-A-G- | | | |
| | P-G-C-P-P-G-P-A-G-G- | | | |
| | A-P-P-P-A-A-A-P-G-G- | | | |
| | A-A-P-P-G-G-A-G-G-A | | | |
| OH-4867- | C-C-C-T-C-C-V-P-C-A- | 0.11 | 0.76 | 595 |
| 15-30 | G-C-C-G-P-P-C-A-A-G- | | | |
| | P-G-C-P-P-G-P-A-G-G- | | | |
| | A-P-P-P-A-A-A-P-G-G- | | | |
| | A-A-P-P-G-G-A-G-G-A | | | |
| OH-4867- | C-C-C-T-C-C-A-V-C-A- | 0.095 | 0.64 | 596 |
| 15-31 | G-C-C-G-P-P-C-A-A-G- | | | |
| | P-G-C-P-P-G-P-A-G-G- | | | |
| | A-P-P-P-A-A-A-P-G-G- | | | |
| | A-A-P-P-G-G-A-G-G-A | | | |
| OH-4867- | C-C-C-T-C-C-A-P-V-A- | 0.079 | 0.53 | 597 |
| 15-32 | G-C-C-G-P-P-C-A-A-G- | | | |
| | P-G-C-P-P-G-P-A-G-G- | | | |
| | A-P-P-P-A-A-A-P-G-G- | | | |
| | A-A-P-P-G-G-A-G-G-A | | | |
| OH-4867- | C-C-C-T-C-C-A-P-C-V- | 0.12 | 0.83 | 598 |
| 15-33 | G-C-C-G-P-P-C-A-A-G- | | | |
| | P-G-C-P-P-G-P-A-G-G- | | | |
| | A-P-P-P-A-A-A-P-G-G- | | | |
| | A-A-P-P-G-G-A-G-G-A | | | |
| OH-4867- | C-C-C-T-C-C-A-P-C-A- | 0.14 | 0.95 | 599 |
| 15-34 | V-C-C-G-P-P-C-A-A-G- | | | |
| | P-G-C-P-P-G-P-A-G-G- | | | |
| | A-P-P-P-A-A-A-P-G-G- | | | |
| | A-A-P-P-G-G-A-G-G-A | | | |
| OH-4867- | C-C-C-T-C-C-A-P-C-A- | 3.4 | 23 | 600 |
| 15-35 | G-V-C-G-P-P-C-A-A-G- | | | |
| | P-G-C-P-P-G-P-A-G-G- | | | |
| | A-P-P-P-A-A-A-P-G-G- | | | |
| | A-A-P-P-G-G-A-G-G-A | | | |
| OH-4867- | C-C-C-T-C-C-A-P-C-A- | 23 | 153 | 601 |
| 15-36 | G-C-V-G-P-P-C-A-A-G- | | | |
| | P-G-C-P-P-G-P-A-G-G- | | | |
| | A-P-P-P-A-A-A-P-G-G- | | | |
| | A-A-P-P-G-G-A-G-G-A | | | |
| OH-4867- | C-C-C-T-C-C-A-P-C-A- | 30 | 205 | 602 |
| 15-37 | G-C-C-V-P-P-C-A-A-G- | | | |
| | P-G-C-P-P-G-P-A-G-G- | | | |
| | A-P-P-P-A-A-A-P-G-G- | | | |
| | A-A-P-P-G-G-A-G-G-A | | | |
| OH-4867- | C-C-C-T-C-C-A-P-C-A- | NB | — | 603 |
| 15-38 | G-C-C-G-V-P-C-A-A-G- | | | |
| | P-G-C-P-P-G-P-A-G-G- | | | |
| | A-P-P-P-A-A-A-P-G-G- | | | |
| | A-A-P-P-G-G-A-G-G-A | | | |
| OH-4867- | C-C-C-T-C-C-A-P-C-A- | NB | — | 604 |
| 15-39 | G-C-C-G-P-V-C-A-A-G- | | | |
| | P-G-C-P-P-G-P-A-G-G- | | | |
| | A-P-P-P-A-A-A-P-G-G- | | | |
| | A-A-P-P-G-G-A-G-G-A | | | |
| OH-4867- | C-C-C-T-C-C-A-P-C-A- | 0.17 | 1.1 | 605 |
| 15-40 | G-C-C-G-P-P-V-A-A-G- | | | |
| | P-G-C-P-P-G-P-A-G-G- | | | |
| | A-P-P-P-A-A-A-P-G-G- | | | |
| | A-A-P-P-G-G-A-G-G-A | | | |
| OH-4867- | C-C-C-T-C-C-A-P-C-A- | 13 | 85 | 606 |
| 15-41 | G-C-C-G-P-P-C-V-A-G- | | | |
| | P-G-C-P-P-G-P-A-G-G- | | | |
| | A-P-P-P-A-A-A-P-G-G- | | | |
| | A-A-P-P-G-G-A-G-G-A | | | |
| OH-4867- | C-C-C-T-C-C-A-P-C-A- | 31 | 207 | 607 |
| 15-42 | G-C-C-G-P-P-C-A-V-G- | | | |
| | P-G-C-P-P-G-P-A-G-G- | | | |
| | A-P-P-P-A-A-A-P-G-G- | | | |
| | A-A-P-P-G-G-A-G-G-A | | | |
| OH-4867- | C-C-C-T-C-C-A-P-C-A- | 9.2 | 62 | 608 |
| 15-43 | G-C-C-G-P-P-C-A-A-V- | | | |
| | P-G-C-P-P-G-P-A-G-G- | | | |
| | A-P-P-P-A-A-A-P-G-G- | | | |
| | A-A-P-P-G-G-A-G-G-A | | | |
| OH-4867- | C-C-C-T-C-C-A-P-C-A- | NB | — | 609 |
| 15-44 | G-C-C-G-P-P-C-A-A-G- | | | |
| | V-G-C-P-P-G-P-A-G-G- | | | |
| | A-P-P-P-A-A-A-P-G-G- | | | |
| | A-A-P-P-G-G-A-G-G-A | | | |
| OH-4867- | C-C-C-T-C-C-A-P-C-A- | 3.5 | 24 | 610 |
| 15-45 | G-C-C-G-P-P-C-A-A-G- | | | |
| | P-V-C-P-P-G-P-A-G-G- | | | |
| | A-P-P-P-A-A-A-P-G-G- | | | |
| | A-A-P-P-G-G-A-G-G-A | | | |
| OH-4867- | C-C-C-T-C-C-A-P-C-A- | NB | — | 611 |
| 15-46 | G-C-C-G-P-P-C-A-A-G- | | | |
| | P-G-V-P-P-G-P-A-G-G- | | | |
| | A-P-P-P-A-A-A-P-G-G- | | | |
| | A-A-P-P-G-G-A-G-G-A | | | |
| OH-4867- | C-C-C-T-C-C-A-P-C-A- | NB | — | 612 |
| 15-47 | G-C-C-G-P-P-C-A-A-G- | | | |
| | P-G-C-V-P-G-P-A-G-G- | | | |
| | A-P-P-P-A-A-A-P-G-G- | | | |
| | A-A-P-P-G-G-A-G-G-A | | | |
| OH-4867- | C-C-C-T-C-C-A-P-C-A- | NB | — | 613 |
| 15-48 | G-C-C-G-P-P-C-A-A-G- | | | |
| | P-G-C-P-V-G-P-A-G-G- | | | |
| | A-P-P-P-A-A-A-P-G-G- | | | |
| | A-A-P-P-G-G-A-G-G-A | | | |
| OH-4867- | C-C-C-T-C-C-A-P-C-A- | 0.079 | 0.54 | 614 |
| 15-49 | G-C-C-G-P-P-C-A-A-G- | | | |
| | P-G-C-P-P-V-P-A-G-G- | | | |
| | A-P-P-P-A-A-A-P-G-G- | | | |
| | A-A-P-P-G-G-A-G-G-A | | | |
| OH-4867- | C-C-C-T-C-C-A-P-C-A- | 3.5 | 24 | 615 |
| 15-50 | G-C-C-G-P-P-C-A-A-G- | | | |
| | P-G-C-P-P-G-V-A-G-G- | | | |
| | A-P-P-P-A-A-A-P-G-G- | | | |
| | A-A-P-P-G-G-A-G-G-A | | | |
| OH-4867- | C-C-C-T-C-C-A-P-C-A- | 1.6 | 11 | 616 |
| 15-51 | G-C-C-G-P-P-C-A-A-G- | | | |
| | P-G-C-P-P-G-P-V-G-G- | | | |
| | A-P-P-P-A-A-A-P-G-G- | | | |
| | A-A-P-P-G-G-A-G-G-A | | | |
| OH-4867- | C-C-C-T-C-C-A-P-C-A- | 0.20 | 1.3 | 617 |
| 15-52 | G-C-C-G-P-P-C-A-A-G- | | | |
| | P-G-C-P-P-G-P-A-V-G- | | | |
| | A-P-P-P-A-A-A-P-G-G- | | | |
| | A-A-P-P-G-G-A-G-G-A | | | |
| OH-4867- | C-C-C-T-C-C-A-P-C-A- | 23 | 157 | 618 |
| 15-53 | G-C-C-G-P-P-C-A-A-G- | | | |
| | P-G-C-P-P-G-P-A-G-V- | | | |
| | A-P-P-P-A-A-A-P-G-G- | | | |
| | A-A-P-P-G-G-A-G-G-A | | | |
| OH-4867- | C-C-C-T-C-C-A-P-C-A- | NB | — | 619 |
| 15-54 | G-C-C-G-P-P-C-A-A-G- | | | |
| | P-G-C-P-P-G-P-A-G-G- | | | |
| | V-P-P-P-A-A-A-P-G-G- | | | |
| | A-A-P-P-G-G-A-G-G-A | | | |
| OH-4867- | C-C-C-T-C-C-A-P-C-A- | NB | — | 620 |
| 15-55 | G-C-C-G-P-P-C-A-A-G- | | | |
| | P-G-C-P-P-G-P-A-G-G- | | | |
| | A-V-P-P-A-A-A-P-G-G- | | | |
| | A-A-P-P-G-G-A-G-G-A | | | |
| OH-4867- | C-C-C-T-C-C-A-P-C-A- | NB | — | 621 |
| 15-56 | G-C-C-G-P-P-C-A-A-G- | | | |
| | P-G-C-P-P-G-P-A-G-G- | | | |
| | A-P-V-P-A-A-A-P-G-G- | | | |
| | A-A-P-P-G-G-A-G-G-A | | | |
| OH-4867- | C-C-C-T-C-C-A-P-C-A- | NB | — | 622 |
| 15-57 | G-C-C-G-P-P-C-A-A-G- | | | |
| | P-G-C-P-P-G-P-A-G-G- | | | |
| | A-P-P-V-A-A-A-P-G-G- | | | |
| | A-A-P-P-G-G-A-G-G-A | | | |
| OH-4867- | C-C-C-T-C-C-A-P-C-A- | NB | — | 623 |
| 15-58 | G-C-C-G-P-P-C-A-A-G- | | | |
| | P-G-C-P-P-G-P-A-G-G- | | | |
| | A-P-P-P-V-A-A-P-G-G- | | | |
| | A-A-P-P-G-G-A-G-G-A | | | |
| OH-4867- | C-C-C-T-C-C-A-P-C-A- | NB | — | 624 |
| 15-59 | G-C-C-G-P-P-C-A-A-G- | | | |
| | P-G-C-P-P-G-P-A-G-G- | | | |
| | A-P-P-P-A-V-A-P-G-G- | | | |
| | A-A-P-P-G-G-A-G-G-A | | | |
| OH-4867- | C-C-C-T-C-C-A-P-C-A- | NB | — | 625 |
| 15-60 | G-C-C-G-P-P-C-A-A-G- | | | |
| | P-G-C-P-P-G-P-A-G-G- | | | |
| | A-P-P-P-A-A-V-P-G-G- | | | |
| | A-A-P-P-G-G-A-G-G-A | | | |
| OH-4867- | C-C-C-T-C-C-A-P-C-A- | NB | — | 626 |
| 15-61 | G-C-C-G-P-P-C-A-A-G- | | | |
| | P-G-C-P-P-G-P-A-G-G- | | | |
| | A-P-P-P-A-A-A-V-G-G- | | | |
| | A-A-P-P-G-G-A-G-G-A | | | |
| OH-4867- | C-C-C-T-C-C-A-P-C-A- | 53 | 361 | 627 |
| 15-62 | G-C-C-G-P-P-C-A-A-G- | | | |
| | P-G-C-P-P-G-P-A-G-G- | | | |
| | A-P-P-P-A-A-A-P-V-G- | | | |
| | A-A-P-P-G-G-A-G-G-A | | | |
| OH-4867- | C-C-C-T-C-C-A-P-C-A- | 15 | 101 | 628 |
| 15-63 | G-C-C-G-P-P-C-A-A-G- | | | |
| | P-G-C-P-P-G-P-A-G-G- | | | |
| | A-P-P-P-A-A-A-P-G-V- | | | |
| | A-A-P-P-G-G-A-G-G-A | | | |
| OH-4867- | C-C-C-T-C-C-A-P-C-A- | 0.22 | 1.5 | 629 |
| 15-64 | G-C-C-G-P-P-C-A-A-G- | | | |
| | P-G-C-P-P-G-P-A-G-G- | | | |
| | A-P-P-P-A-A-A-P-G-G- | | | |
| | V-A-P-P-G-G-A-G-G-A | | | |
| OH-4867- | C-C-C-T-C-C-A-P-C-A- | 0.13 | 0.88 | 630 |
| 15-65 | G-C-C-G-P-P-C-A-A-G- | | | |
| | P-G-C-P-P-G-P-A-G-G- | | | |
| | A-P-P-P-A-A-A-P-G-G- | | | |
| | A-V-P-P-G-G-A-G-G-A | | | |
| OH-4867- | C-C-C-T-C-C-A-P-C-A- | 0.11 | 0.72 | 631 |
| 15-66 | G-C-C-G-P-P-C-A-A-G- | | | |
| | P-G-C-P-P-G-P-A-G-G- | | | |
| | A-P-P-P-A-A-A-P-G-G- | | | |
| | A-A-V-P-G-G-A-G-G-A | | | |
| OH-4867- | C-C-C-T-C-C-A-P-C-A- | 0.15 | 0.99 | 632 |
| 615-7 | G-C-C-G-P-P-C-A-A-G- | | | |
| | P-G-C-P-P-G-P-A-G-G- | | | |
| | A-P-P-P-A-A-A-P-G-G- | | | |
| | A-A-P-V-G-G-A-G-G-A | | | |
| OH-4867- | C-C-C-T-C-C-A-P-C-A- | 0.32 | 21 | 633 |
| 15-68 | G-C-C-G-P-P-C-A-A-G- | | | |
| | P-G-C-P-P-G-P-A-G-G- | | | |
| | A-P-P-P-A-A-A-P-G-G- | | | |
| | A-A-P-P-V-G-A-G-G-A | | | |
| OH-4867- | C-C-C-T-C-C-A-P-C-A- | 0.77 | 5.2 | 634 |
| 15-69 | G-C-C-G-P-P-C-A-A-G- | | | |
| | P-G-C-P-P-G-P-A-G-G- | | | |
| | A-P-P-P-A-A-A-P-G-G- | | | |
| | A-A-P-P-G-V-A-G-G-A | | | |
| OH-4867- | C-C-C-T-C-C-A-P-C-A- | 0.68 | 4.6 | 635 |
| 15-70 | G-C-C-G-P-P-C-A-A-G- | | | |
| | P-G-C-P-P-G-P-A-G-G- | | | |
| | A-P-P-P-A-A-A-P-G-G- | | | |
| | A-A-P-P-G-G-V-G-G-A | | | |
| OH-4867- | C-C-C-T-C-C-A-P-C-A- | 0.24 | 1.6 | 636 |
| 15-71 | G-C-C-G-P-P-C-A-A-G- | | | |
| | P-G-C-P-P-G-P-A-G-G- | | | |
| | A-P-P-P-A-A-A-P-G-G- | | | |
| | A-A-P-P-G-G-A-V-G-A | | | |
| OH-4867- | C-C-C-T-C-C-A-P-C-A- | 0.19 | 1.3 | 637 |
| 15-72 | G-C-C-G-P-P-C-A-A-G- | | | |
| | P-G-C-P-P-G-P-A-G-G- | | | |
| | A-P-P-P-A-A-A-P-G-G- | | | |
| | A-A-P-P-G-G-A-G-V-A | | | |
| OH-4867- | C-C-C-T-C-C-A-P-C-A- | 0.17 | 1.1 | 638 |
| 15-73 | G-C-C-G-P-P-C-A-A-G- | | | |
| | P-G-C-P-P-G-P-A-G-G- | | | |
| | A-P-P-P-A-A-A-P-G-G- | | | |
| | A-A-P-P-G-G-A-G-G-V | | | |

TABLE 12
2′-O-methyl substitutions
in VEGF aptamer 4867-31_43

| | | | ratio | Seq. |
|---|---|---|---|---|
| Aptamer | Sequence | K_{d} | to | ID. |
| ID. No. | 5′ → 3′ | (nM) | parent | NO. |
| OH-4867- | A-G-C-C-G-P-P-C- | 0.29 | 1.0 | 567 |
| 31-43 | A-A-G-P-G-C-P-P- | | | |
| | G-P-A-G-G-A-P-P- | | | |
| | P-A-A-A-P-G-G-A | | | |
| OH-4867- | A¹-G-C-C-G-P-P-C- | NB | — | 639 |
| 31_65 | A-A-G-P-G-C-P-P- | | | |
| | G-P-A-G-G-A-P-P- | | | |
| | P-A-A-A-P-G-G-A | | | |
| OH-4867- | A-G¹-C-C-G-P-P-C- | 0.17 | 0.6 | 640 |
| 31_66 | A-A-G-P-G-C-P-P- | | | |
| | G-P-A-G-G-A-P-P- | | | |
| | P-A-A-A-P-G-G-A | | | |
| OH-4867- | A-G-C¹-C-G-P-P-C- | 0.33 | 1.2 | 641 |
| 31_67 | A-A-G-P-G-C-P-P- | | | |
| | G-P-A-G-G-A-P-P- | | | |
| | P-A-A-A-P-G-G-A | | | |
| OH-4867- | A-G-C-C¹-G-P-P-C- | 7.55 | 26.0 | 642 |
| 31_68 | A-A-G-P-G-C-P-P- | | | |
| | G-P-A-G-G-A-P-P- | | | |
| | P-A-A-A-P-G-G-A | | | |
| OH-4867- | A-G-C-C-G¹-P-P-C- | NB | — | 643 |
| 31_69 | A-A-G-P-G-C-P-P- | | | |
| | G-P-A-G-G-A-P-P- | | | |
| | P-A-A-A-P-G-G-A | | | |
| OH-4867- | A-G-C-C-G-U¹-P-C- | NB | — | 644 |
| 31_70 | A-A-G-P-G-C-P-P- | | | |
| | G-P-A-G-G-A-P-P- | | | |
| | P-A-A-A-P-G-G-A | | | |
| OH-4867- | A-G-C-C-G-P-U¹-C- | NB | — | 645 |
| 31_71 | A-A-G-P-G-C-P-P- | | | |
| | G-P-A-G-G-A-P-P- | | | |
| | P-A-A-A-P-G-G-A | | | |
| OH-4867- | A-G-C-C-G-P-P-C¹- | 0.21 | 0.7 | 646 |
| 31_72 | A-A-G-P-G-C-P-P- | | | |
| | G-P-A-G-G-A-P-P- | | | |
| | P-A-A-A-P-G-G-A | | | |
| OH-4867- | A-G-C-C-G-P-P-C- | 5.99 | 20.7 | 647 |
| 31_73 | A¹-A-G-P-G-C-P-P- | | | |
| | G-P-A-G-G-A-P-P- | | | |
| | P-A-A-A-P-G-G-A | | | |
| OH-4867- | A-G-C-C-G-P-P-C- | 3.14 | 10.8 | 648 |
| 31_74 | A-A¹-G-P-G-C-P-P- | | | |
| | G-P-A-G-G-A-P-P- | | | |
| | P-A-A-A-P-G-G-A | | | |
| OH-4867- | A-G-C-C-G-P-P-C- | 0.15 | 0.5 | 649 |
| 31_75 | A-A-G¹-P-G-C-P-P- | | | |
| | G-P-A-G-G-A-P-P- | | | |
| | P-A-A-A-P-G-G-A | | | |
| OH-4867- | A-G-C-C-G-P-P-C- | 22.90 | 79.0 | 650 |
| 31_76 | A-A-G-U¹-G-C-P-P- | | | |
| | G-P-A-G-G-A-P-P- | | | |
| | P-A-A-A-P-G-G-A | | | |
| OH-4867- | A-G-C-C-G-P-P-C- | 6.64 | 22.9 | 651 |
| 31_77 | A-A-G-P-G¹-C-P-P- | | | |
| | G-P-A-G-G-A-P-P- | | | |
| | P-A-A-A-P-G-G-A | | | |
| OH-4867- | A-G-C-C-G-P-P-C- | 0.24 | 0.8 | 652 |
| 31_78 | A-A-G-P-G-C¹-P-P- | | | |
| | G-P-A-G-G-A-P-P- | | | |
| | P-A-A-A-P-G-G-A | | | |
| OH-4867- | A-G-C-C-G-P-P-C- | NB | — | 653 |
| 31_79 | A-A-G-P-G-C-U¹-P- | | | |
| | G-P-A-G-G-A-P-P- | | | |
| | P-A-A-A-P-G-G-A | | | |
| OH-4867- | A-G-C-C-G-P-P-C- | NB | — | 654 |
| 31_80 | A-A-G-P-G-C-P-U¹- | | | |
| | G-P-A-G-G-A-P-P- | | | |
| | P-A-A-A-P-G-G-A | | | |
| OH-4867- | A-G-C-C-G-P-P-C- | 0.44 | 1.5 | 655 |
| 31_81 | A-A-G-P-G-C-P-P- | | | |
| | G¹-P-A-G-G-A-P-P- | | | |
| | P-A-A-A-P-G-G-A | | | |
| OH-4867- | A-G-C-C-G-P-P-C- | NB | — | 656 |
| 31_82 | A-A-G-P-G-C-P-P- | | | |
| | G-U¹-A-G-G-A-P-P- | | | |
| | P-A-A-A-P-G-G-A | | | |
| OH-4867- | A-G-C-C-G-P-P-C- | 0.10 | 0.3 | 657 |
| 31_83 | A-A-G-P-G-C-P-P- | | | |
| | G-P-A¹-G-G-A-P-P- | | | |
| | P-A-A-A-P-G-G-A | | | |
| OH-4867- | A-G-C-C-G-P-P-C- | 0.21 | 0.7 | 658 |
| 31_84 | A-A-G-P-G-C-P-P- | | | |
| | G-P-A-G¹-G-A-P-P- | | | |
| | P-A-A-A-P-G-G-A | | | |
| OH-4867- | A-G-C-C-G-P-P-C- | 25.80 | 89.0 | 659 |
| 31_85 | A-A-G-P-G-C-P-P- | | | |
| | G-P-A-G-G¹-A-P-P- | | | |
| | P-A-A-A-P-G-G-A | | | |
| OH-4867- | A-G-C-C-G-P-P-C- | 6.21 | 21.4 | 660 |
| 31_86 | A-A-G-P-G-C-P-P- | | | |
| | G-P-A-G-G-A¹-P-P- | | | |
| | P-A-A-A-P-G-G-A | | | |
| OH-4867- | A-G-C-C-G-P-P-C- | NB | — | 661 |
| 31_87 | A-A-G-P-G-C-P-P- | | | |
| | G-P-A-G-G-A-U¹-P- | | | |
| | P-A-A-A-P-G-G-A | | | |
| OH-4867- | A-G-C-C-G-P-P-C- | NB | — | 662 |
| 31_88 | A-A-G-P-G-C-P-P- | | | |
| | G-P-A-G-G-A-P-U¹- | | | |
| | P-A-A-A-P-G-G-A | | | |
| OH-4867- | A-G-C-C-G-P-P-C- | NB | — | 663 |
| 31_89 | A-A-G-P-G-C-P-P- | | | |
| | G-P-A-G-G-A-P-P- | | | |
| | U¹-A-A-A-P-G-G-A | | | |
| OH-4867- | A-G-C-C-G-P-P-C- | 2.85 | 9.8 | 664 |
| 31_90 | A-A-G-P-G-C-P-P- | | | |
| | G-P-A-G-G-A-P-P- | | | |
| | P-A¹-A-A-P-G-G-A | | | |
| OH-4867- | A-G-C-C-G-P-P-C- | 0.35 | 1.2 | 665 |
| 31_91 | A-A-G-P-G-C-P-P- | | | |
| | G-P-A-G-G-A-P-P- | | | |
| | P-A-A¹-A-P-G-G-A | | | |
| OH-4867- | A-G-C-C-G-P-P-C- | 8.87 | 30.6 | 666 |
| 31_92 | A-A-G-P-G-C-P-P- | | | |
| | G-P-A-G-G-A-P-P- | | | |
| | P-A-A-A¹-P-G-G-A | | | |
| OH-4867- | A-G-C-C-G-P-P-C- | NB | — | 667 |
| 31_93 | A-A-G-P-G-C-P-P- | | | |
| | G-P-A-G-G-A-P-P- | | | |
| | P-A-A-A-U¹-G-G-A | | | |
| OH-4867- | A-G-C-C-G-P-P-C- | 0.21 | 0.7 | 668 |
| 31_94 | A-A-G-P-G-C-P-P- | | | |
| | G-P-A-G-G-A-P-P- | | | |
| | P-A-A-A-P-G¹-G-A | | | |
| OH-4867- | A-G-C-C-G-P-P-C- | 0.19 | 0.7 | 669 |
| 31_95 | A-A-G-P-G-C-P-P- | | | |
| | G-P-A-G-G-A-P-P- | | | |
| | P-A-A-A-P-G-G¹-A | | | |
| OH-4867- | A-G-C-C-G-P-P-C- | 0.13 | 0.4 | 670 |
| 31_96 | A-A-G-P-G-C-P-P- | | | |
| | G-P-A-G-G-A-P-P- | | | |
| | P-A-A-A-P-G-G-A¹ | | | |
| OH-4867- | A-G-C-C-G-P-P-V- | 7.30 | 25.2 | 671 |
| 31_97 | A-A-G-P-G-C-P-P- | | | |
| | G-P-A-G-G-A-P-P- | | | |
| | P-A-A-A-P-G-G-A | | | |
| OH-4867- | A-G-C-C-G-P-P-C- | 0.10 | 0.3 | 672 |
| 31_98 | A-A-G-P-G-C-P-P- | | | |
| | V-P-A-G-G-A-P-P- | | | |
| | P-A-A-A-P-G-G-A | | | |
| OH-4867- | A-G-C-C-G-P-P-C- | 0.22 | 0.8 | 673 |
| 31_99 | A-A-G-P-G-C-P-P- | | | |
| | G-P-A-V-G-A-P-P- | | | |
| | P-A-A-A-P-G-G-A | | | |
| OH-4867- | A-G-C-C-G-P-P-V- | NB | — | 674 |
| 31_100 | A-A-G-P-G-C-P-P- | | | |
| | V-P-A-V-G-A-P-P- | | | |
| | P-A-A-A-P-G-G-A | | | |
| OH-4867- | A-G-C-C-G-P-P-A- | 5.89 | 20.3 | 675 |
| 31_101 | A-G-P-G-C-P-P-G- | | | |
| | P-A-G-G-A-P-P-P- | | | |
| | A-A-A-P-G-G-A | | | |
| OH-4867- | A-G-C-C-G-P-P-C- | NB | — | 676 |
| 31_102 | A-A-G-P-G-C-P-P- | | | |
| | P-A-G-G-A-P-P-P- | | | |
| | A-A-A-P-G-G-A | | | |
| OH-4867- | A-G-C-C-G-P-P-C- | NB | — | 677 |
| 31_103 | A-A-G-P-G-C-P-P- | | | |
| | G-P-A-G-A-P-P-P- | | | |
| | A-A-A-P-G-G-A | | | |
| OH-4867- | C-C-G-P-P-A-A-A- | 3.08 | 10.6 | 678 |
| 31_145 | G-P-G-C-P-P-G-P- | | | |
| | A-G-G-A-P-P-P-A- | | | |
| | A-A-P-G-G-A | | | |
| OH-4867- | C-C-G-P-P-G-A-A- | 5.98 | 20.6 | 679 |
| 31_146 | G-P-G-C-P-P-G-P- | | | |
| | A-G-G-A-P-P-P-A- | | | |
| | A-A-P-G-G-A | | | |
| OH-4867- | C-C-G-P-P-T-A-A- | 3.28 | 11.3 | 680 |
| 31_147 | G-P-G-C-P-P-G-P- | | | |
| | A-G-G-A-P-P-P-A- | | | |
| | A-A-P-G-G-A | | | |
| OH-4867- | C-C-G-P-P-C-A-A- | 0.53 | 1.8 | 681 |
| 31_148 | G-P-G-C-P-P-A-P- | | | |
| | A-G-G-A-P-P-P-A- | | | |
| | A-A-P-G-G-A | | | |
| OH-4867- | C-C-G-P-P-C-A-A- | 0.27 | 0.9 | 682 |
| 31_149 | G-P-G-C-P-P-C-P- | | | |
| | A-G-G-A-P-P-P-A- | | | |
| | A-A-P-G-G-A | | | |
| OH-4867- | C-C-G-P-P-C-A-A- | 0.24 | 0.8 | 683 |
| 31_150 | G-P-G-C-P-P-T-P- | | | |
| | A-G-G-A-P-P-P-A- | | | |
| | A-A-P-G-G-A | | | |
| OH-4867- | C-C-G-P-P-C-A-A- | 0.16 | 0.6 | 684 |
| 31_151 | G-P-G-C-P-P-G-P- | | | |
| | A-A-G-A-P-P-P-A- | | | |
| | A-A-P-G-G-A | | | |
| OH-4867- | C-C-G-P-P-C-A-A- | 0.32 | 1.1 | 685 |
| 31_152 | G-P-G-C-P-P-G-P- | | | |
| | A-C-G-A-P-P-P-A- | | | |
| | A-A-P-G-G-A | | | |
| OH-4867- | C-C-G-P-P-C-A-A- | 0.21 | 0.7 | 686 |
| 31_153 | G-P-G-C-P-P-G-P- | | | |
| | A-T-G-A-P-P-P-A- | | | |
| | A-A-P-G-G-A | | | |

TABLE 13
Single 2′-O-methyl Nap-U Substitutions,
and multiple 2′-O-methyl substitutions
in VEGF aptamer 4867-31_143

| | | | ratio | % | Seq. |
|---|---|---|---|---|---|
| Aptamer | Sequence | K_{d} | to | Activity | ID. |
| ID. No. | 5′ → 3′ | (M) | parent | Remaining | NO. |
| 4867- | C-C-G-P-P-C-A-A- | 1.4E−10 | 1.0 | 12%, 7% | 586 |
| 31_143 | G-P-G-C-P-P-G-P- | | | | |
| | A-G-G-A-P-P-P-A- | | | | |
| | A-A-P-G-G | | | | |
| 4867- | C-C-G-P¹-P-C-A-A- | 5.9E−09 | 44 | | 687 |
| 31_154 | G-P-G-C-P-P-G-P- | | | | |
| | A-G-G-A-P-P-P-A- | | | | |
| | A-A-P-G-G | | | | |
| 4867- | C-C-G-P-P¹-C-A-A- | 3.3E−09 | 24 | | 688 |
| 31_155 | G-P-G-C-P-P-G-P- | | | | |
| | A-G-G-A-P-P-P-A- | | | | |
| | A-A-P-G-G | | | | |
| 4867- | C-C-G-P-P-C-A-A- | 6.8E−10 | 5.0 | 52%, 74% | 689 |
| 31_156 | G-P¹-G-C-P-P-G-P- | | | | |
| | A-G-G-A-P-P-P-A- | | | | |
| | A-A-P-G-G | | | | |
| 4867- | C-C-G-P-P-C-A-A- | 1.5E−09 | 11 | 54%, 101% | 690 |
| 31_157 | G-P-G-C-P¹-P-G-P- | | | | |
| | A-G-G-A-P-P-P-A- | | | | |
| | A-A-P-G-G | | | | |
| 4867- | C-C-G-P-P-C-A-A- | 1.7E−09 | 12 | 59%, 106% | 691 |
| 31_158 | G-P-G-C-P-P¹-G-P- | | | | |
| | A-G-G-A-P-P-P-A- | | | | |
| | A-A-P-G-G | | | | |
| 4867- | C-C-G-P-P-C-A-A- | 5.6E−10 | 4.1 | 7%, 64% | 692 |
| 31_159 | G-P-G-C-P-P-G-P¹- | | | | |
| | A-G-G-A-P-P-P-A- | | | | |
| | A-A-P-G-G | | | | |
| 4867- | C-C-G-P-P-C-A-A- | 1.5E−09 | 11 | 52%, 95% | 693 |
| 31_160 | G-P-G-C-P-P-G-P- | | | | |
| | A-G-G-A-P¹-P-P-A- | | | | |
| | A-A-P-G-G | | | | |
| 4867- | C-C-G-P-P-C-A-A- | 6.4E−11 | 0.47 | 5%, 4%, - | 694 |
| 31_161 | G-P-G-C-P-P-G-P- | | | 2% | |
| | A-G-G-A-P-P¹-P-A- | | | | |
| | A-A-P-G-G | | | | |
| 4867- | C-C-G-P-P-C-A-A- | 8.9E−09 | 65 | 84%, | 695 |
| 31_162 | G-P-G-C-P-P-G-P- | | | 117% | |
| | A-G-G-A-P-P-P¹-A- | | | | |
| | A-A-P-G-G | | | | |
| 4867- | C-C-G-P-P-C-A-A- | 2.6E−10 | 1.9 | 53%, 45% | 696 |
| 31_163 | G-P-G-C-P-P-G-P- | | | | |
| | A-G-G-A-P-P-P-A- | | | | |
| | A-A-P¹-G-G | | | | |
| 4867- | C-C-G-P-P-C-A-A- | 9.1E−11 | 0.67 | 15% | 697 |
| 31_183 | G-P-G-C-P-P-V-P- | | | | |
| | A-V-G-A-P-P-P-A- | | | | |
| | A-A-P-G-G | | | | |
| 4867- | C-C-G-P-P-C-A-A- | 8.4E−11 | 0.62 | 7% | 698 |
| 31_184 | G¹-P-G-C-P-P-V-P- | | | | |
| | A¹-V-G-A-P-P-P-A- | | | | |
| | A-A-P-G-G | | | | |
| 4867- | C-C-G-P-P-C¹-A-A- | 2.6E−10 | 1.9 | 50% | 699 |
| 31_185 | G¹-P-G-C¹-P-P-V- | | | | |
| | P-A¹-V-G-A-P-P-P- | | | | |
| | A-A-A-P-G¹-G¹ | | | | |
| 4867- | C¹-C-G-P-P-C¹-A- | 1.6E−09 | 12 | 77% | 700 |
| 31_186 | A-G¹-P-G-C¹-P-P- | | | | |
| | V-P-A¹-V-G-A-P-P- | | | | |
| | P-A-A¹-A-P-G¹-G¹ | | | | |
| 4867- | C-C-G-P-P-C-A-A- | 3.2E−11 | 0.24 | -2% | 701 |
| 31_187 | G¹-P-G-C-P-P-V-P- | | | | |
| | A¹-G-G-A-P-P-P-A- | | | | |
| | A-A-P-G-G | | | | |
| 4867- | C-C-G-P-P-C¹-A-A- | 3.8E−11 | 0.28 | -2% | 702 |
| 31_188 | G¹-P-G-C¹-P-P-V- | | | | |
| | P-A¹-G¹-G-A-P-P- | | | | |
| | P-A-A-A-P-G¹-G¹ | | | | |
| 4867- | C¹-C-G-P-P-C¹-A- | 9.0E−10 | 6.6 | 13% | 703 |
| 31_189 | A-G¹-P-G-C¹-P-P- | | | | |
| | V-P-A¹-G¹-G-A-P- | | | | |
| | P-P-A-A¹-A-P- | | | | |
| | G¹-G¹ | | | | |

TABLE 14
Multiple 2′-O-methyl substitutions
in VEGF aptamer 4867-31_143

| | | | Ratio | Seq. |
|---|---|---|---|---|
| | | | to | |
| Aptamer | | | 4867- | ID. |
| ID. No. | Sequence 5′→3′ | K_{d} (M) | 31_188 | NO. |
| 4867- | C-C-G-P-P-C¹-A-A-G¹-P- | 4.8E−11 | 1.0 | 702 |
| 31_188 | G-C¹-P-P-V-P-A¹-G¹-G-A- | | | |
| | P-P-P-A-A-A-P-G¹-G¹ | | | |
| 4867- | C-C-G-P-P-C¹-A-A-G¹-P- | 8.9E−11 | 1.9 | 704 |
| 31_190 | G-C¹-P-P-V-P-A¹-G1-G-A- | | | |
| | P-P¹-P-A-A-A-P-G¹-G¹ | | | |
| 4867- | C-C-G-P-P-C¹-A-A-G¹-P- | 1.0E−10 | 2.1 | 705 |
| 31_191 | G-C¹-P-P-G¹-P-A¹-G¹-G-A- | | | |
| | P-P-P-A-A-A-P-G¹-G¹ | | | |
| 4867- | C-C-G-P-P-C¹-A-A-G¹-P- | 3.5E−11 | 0.7 | 706 |
| 31_192 | G-C¹-P-P-G¹-P-A¹-G¹-G-A- | | | |
| | P-P¹-P-A-A-A-P-G¹-G¹ | | | |

TABLE 15
PDGF homodimers of
4149-8_379 and 5169-4_26.

| Aptamer | | Kᵢ | Seq. ID. |
|---|---|---|---|
| ID. No. | Sequence (5′→3′) | (pM) | NO. |
| 4149-8_438 | Z-M-A¹-C-H-G-Z¹-Z-A- | 4.2 | 707 |
| | C-C3-C¹-G-C-G-Z-Z-Z¹- | | |
| | A¹-Z-A¹-G-C-G¹-Z-M-A¹- | | |
| | C-H-G-Z¹-Z-A-C-C3-C¹- | | |
| | G-C-G-Z-Z-Z¹-A¹-Z-A¹- | | |
| | G-C-G¹ | | |
| 4149-8_439 | Z-M-A¹-C-H-G-Z¹-Z-A- | 3.5 | 708 |
| | C-C3-C¹-G-C-G-Z-Z-Z¹- | | |
| | A¹-Z-A¹-G-C-G¹-H-Z-M- | | |
| | A¹-C-H-G-Z¹-Z-A-C-C3- | | |
| | C¹-G-C-G-Z-Z-Z¹-A¹-Z- | | |
| | A¹-G-C-G¹ | | |
| 4149-8_440 | Z-M-A¹-C-H-G-Z¹-Z-A- | 1.4 | 709 |
| | C-C3-C¹-G-C-G-Z-Z-Z¹- | | |
| | A¹-Z-A¹-G-C-G¹-H-H-Z- | | |
| | M-A¹-C-H-G-Z¹-Z-A-C- | | |
| | C3-C¹-G-C-G-Z-Z-Z¹- | | |
| | A¹-Z-A¹-G-C-G¹ | | |
| 4149-8_441 | Z-M-A¹-C-H-G-Z¹-Z-A- | 0.78 | 710 |
| | C-C3-C¹-G-C-G-Z-Z-Z¹- | | |
| | A¹-Z-A¹-G-C-G¹-H-H-H- | | |
| | Z-M-A¹-C-H-G-Z¹-Z-A- | | |
| | C-C3-C¹-G-C-G-Z-Z-Z¹- | | |
| | A¹-Z-A¹-G-C-G¹ | | |
| 4149-8_442 | Z-M-A¹-C-H-G-Z¹-Z-A- | 0.51 | 711 |
| | C-C3-C¹-G-C-G-Z-Z-Z¹- | | |
| | A¹-Z-A¹-G-C-G¹-H-H-H- | | |
| | H-Z-M-A¹-C-H-G-Z¹-Z- | | |
| | A-C-C3-C¹-G-C-G-Z-Z- | | |
| | Z¹-A¹-Z-A¹-G-C-G¹ | | |
| 4149-8_443 | Z-M-A¹-C-H-G-Z¹-Z-A- | 0.25 | 712 |
| | C-C3-C¹-G-C-G-Z-Z-Z¹- | | |
| | A¹-Z-A¹-G-C-G¹-H-H-H- | | |
| | H-H-Z-M-A¹-C-H-G-Z¹- | | |
| | Z-A-C-C3-C¹-G-C-G-Z- | | |
| | Z-Z¹-A¹-Z-A¹-G-C-G¹ | | |
| 4149-8_444 | Z-M-A¹-C-H-G-Z¹-Z-A- | 0.61 | 713 |
| | C-C3-C¹-G-C-G-Z-Z-Z¹- | | |
| | A¹-Z-A¹-G-C-G¹-H-H-H- | | |
| | H-H-H-Z-M-A¹-C-H-G- | | |
| | Z¹-Z-A-C-C3-C¹-G-C- | | |
| | G-Z-Z-Z¹-A¹-Z-A¹-G- | | |
| | C-G¹ | | |
| 4149-8_379D | Z-M-A¹-C-H-G-Z¹-Z-A- | 11 | 714 |
| | C-C3-C¹-G-C-G-Z-Z-Z¹- | | |
| | A¹-Z-A¹-G-C-G¹-G¹-C- | | |
| | G-A¹-Z-A¹-Z¹-Z-Z-G- | | |
| | C-G-C¹-C3-C-A-Z-Z¹- | | |
| | G-H-C-A¹-M-Z | | |
| 4149-8_445 | Z-M-A¹-C-H-G-Z¹-Z-A- | 1.1 | 715 |
| | C-C3-C¹-G-C-G-Z-Z-Z¹- | | |
| | A¹-Z-A¹-G-C-G¹-H-H-G¹- | | |
| | C-G-A¹-Z-A¹-Z¹-Z-Z-G- | | |
| | C-G-C¹-C3-C-A-Z-Z¹- | | |
| | G-H-C-A¹-M-Z | | |
| 4149-8_446 | Z-M-A¹-C-H-G-Z¹-Z-A- | 0.61 | 716 |
| | C-C3-C¹-G-C-G-Z-Z-Z¹- | | |
| | A¹-Z-A¹-G-C-G¹-H-H-H- | | |
| | H-G¹-C-G-A¹-Z-A¹-Z¹- | | |
| | Z-Z-G-C-G-C¹-C3-C-A- | | |
| | Z-Z¹-G-H-C-A¹-M-Z | | |
| 4149-8_447 | Z-M-A¹-C-H-G-Z¹-Z-A- | 0.88 | 717 |
| | C-C3-C¹-G-C-G-Z-Z-Z¹- | | |
| | A¹-Z-A¹-G-C-G¹-H-H-H- | | |
| | H-H-H-G¹-C-G-A¹-Z-A¹- | | |
| | Z¹-Z-Z-G-C-G-C¹-C3-C- | | |
| | A-Z-Z¹-G-H-C-A¹-M-Z | | |
| 5169-4_134 | C-G-A-C-A-G-C-A-P-G- | 28 | 718 |
| | P-A-P-G-C-A-C-A-P-C- | | |
| | P-C-G-A-C-A-G-C-A-P- | | |
| | G-P-A-P-G-C-A-C-A-P- | | |
| | C-P | | |
| 5169-4_135 | C-G-A-C-A-G-C-A-P-G- | 9.3 | 719 |
| | P-A-P-G-C-A-C-A-P-C- | | |
| | P-H-C-G-A-C-A-G-C-A- | | |
| | P-G-P-A-P-G-C-A-C-A- | | |
| | P-C-P | | |
| 5169-4_136 | C-G-A-C-A-G-C-A-P-G- | 8.7 | 720 |
| | P-A-P-G-C-A-C-A-P-C- | | |
| | P-H-H-C-G-A-C-A-G-C- | | |
| | A-P-G-P-A-P-G-C-A-C- | | |
| | A-P-C-P | | |
| 5169-4_137 | C-G-A-C-A-G-C-A-P-G- | 5.1 | 721 |
| | P-A-P-G-C-A-C-A-P-C- | | |
| | P-H-H-H-C-G-A-C-A-G- | | |
| | C-A-P-G-P-A-P-G-C-A- | | |
| | C-A-P-C-P | | |
| 5169-4_138 | C-G-A-C-A-G-C-A-P-G- | 4.9 | 722 |
| | P-A-P-G-C-A-C-A-P-C- | | |
| | P-H-H-H-H-C-G-A-C-A- | | |
| | G-C-A-P-G-P-A-P-G-C- | | |
| | A-C-A-P-C-P | | |
| 5169-4_139 | C-G-A-C-A-G-C-A-P-G- | 3.6 | 723 |
| | P-A-P-G-C-A-C-A-P-C- | | |
| | P-H-H-H-H-H-C-G-A-C- | | |
| | A-G-C-A-P-G-P-A-P-G- | | |
| | C-A-C-A-P-C-P | | |
| 5169-4_140 | C-G-A-C-A-G-C-A-P-G- | 3.6 | 724 |
| | P-A-P-G-C-A-C-A-P-C- | | |
| | P-H-H-H-H-H-H-C-G-A- | | |
| | C-A-G-C-A-P-G-P-A-P- | | |
| | G-C-A-C-A-P-C-P | | |
| 5169-4_26D | C-G-A-C-A-G-C-A-P-G- | 11 | 725 |
| | P-A-P-G-C-A-C-A-P-C- | | |
| | P-P-C-P-A-C-A-C-G-P- | | |
| | A-P-G-P-A-C-G-A-C-A- | | |
| | G-C | | |
| 5169-4_141 | C-G-A-C-A-G-C-A-P-G- | 13 | 726 |
| | P-A-P-G-C-A-C-A-P-C- | | |
| | P-H-H-P-C-P-A-C-A-C- | | |
| | G-P-A-P-G-P-A-C-G-A- | | |
| | C-A-G-C | | |
| 5169-4_142 | C-G-A-C-A-G-C-A-P-G- | 5.5 | 727 |
| | P-A-P-G-C-A-C-A-P-C- | | |
| | P-H-H-H-H-P-C-P-A-C- | | |
| | A-C-G-P-A-P-G-P-A-C- | | |
| | G-A-C-A-G-C | | |
| 5169-4_143 | C-G-A-C-A-G-C-A-P-G- | 2.0 | 728 |
| | P-A-P-G-C-A-C-A-P-C- | | |
| | P-H-H-H-H-H-H-P-C-P- | | |
| | A-C-A-C-G-P-A-P-G-P- | | |
| | A-C-G-A-C-A-G-C | | |

TABLE 16
VEGF homodimers of 4867-31_192.

| Aptamer | Sequence | Kᵢ | Seq. |
|---|---|---|---|
| ID. No. | (5′→3′) | (pM) | ID. NO. |
| 4867- | C-C-G-P-P-C¹-A-A-G¹-P- | 6.8 | 729 |
| 31_395 | G-C¹-P-P-G¹-P-A¹-G¹-G-A- | | |
| | P-P¹-P-A-A-A-P-G¹-G¹-C- | | |
| | C-G-P-P-C¹-A-A-G¹-P-G- | | |
| | C¹-P-P-G¹-P-A¹-G¹-G-A- | | |
| | P-P¹-P-A-A-A-P-G¹-G¹ | | |
| 4867- | C-C-G-P-P-C¹-A-A-G¹-P- | 50 | 730 |
| 31_396 | G-C¹-P-P-G¹-P-A¹-G¹-G- | | |
| | A-P-P¹-P-A-A-A-P-G¹-G¹- | | |
| | H-C-C-G-P-P-C¹-A-A-G¹- | | |
| | P-G-C-P-P-G¹-P-A¹-G¹-G- | | |
| | A-P-P¹-P-A-A-A-P-G¹-G¹ | | |
| 4867- | C-C-G-P-P-C¹-A-A-G¹-P- | 43 | 731 |
| 31_397 | G-C¹-P-P-G¹-P-A¹-G¹-G- | | |
| | A-P-P¹-P-A-A-A-P-G¹-G¹- | | |
| | H-H-C-C-G-P-P-C¹-A-A- | | |
| | G¹-P-G-C¹-P-P-G¹-P-A¹- | | |
| | G¹-G-A-P-P¹-P-A-A-A-P- | | |
| | G¹-G¹ | | |
| 4867- | C-C-G-P-P-C¹-A-A-G¹-P- | 29 | 732 |
| 31_398 | G-C¹-P-P-G¹-P-A¹-G¹-G- | | |
| | A-P-P¹-P-A-A-A-P-G¹-G¹- | | |
| | H-H-H-C-C-G-P-P-C¹-A- | | |
| | A-G¹-P-G-C¹-P-P-G¹-P- | | |
| | A¹-G¹-G-A-P-P¹-P-A-A- | | |
| | A-P-G¹-G¹ | | |
| 4867- | C-C-G-P-P-C¹-A-A-G¹-P- | 22 | 733 |
| 31_399 | G-C¹-P-P-G¹-P-A¹-G¹-G- | | |
| | A-P-P¹-P-A-A-A-P-G¹-G¹- | | |
| | H-H-H-H-C-C-G-P-P-C¹- | | |
| | A-A-G¹-P-G-C¹-P-P-G¹-P- | | |
| | A¹-G¹-G-A-P-P¹-P-A-A-A- | | |
| | P-G¹-G¹ | | |
| 4867- | C-C-G-P-P-C¹-A-A-G¹-P- | 14 | 734 |
| 31_400 | G-C¹-P-P-G¹-P-A¹-G¹-G- | | |
| | A-P-P¹-P-A-A-A-P-G¹-G¹- | | |
| | H-H-H-H-H-C-C-G-P-P- | | |
| | C¹-A-A-G¹-P-G-C¹-P-P- | | |
| | G¹-P-A¹-G¹-G-A-P-P¹-P- | | |
| | A-A-A-P-G¹-G¹ | | |
| 4867- | C-C-G-P-P-C¹-A-A-G¹-P- | 21 | 735 |
| 31_401 | G-C¹-P-P-G¹-P-A¹-G¹-G- | | |
| | A-P-P¹-P-A-A-A-P-G¹-G¹- | | |
| | H-H-H-H-H-H-C-C-G-P-P- | | |
| | C¹-A-A-G¹-P-G-C¹-P-P- | | |
| | G¹-P-A¹-G¹-G-A-P-P¹-P- | | |
| | A-A-A-P-G¹-G¹ | | |
| 4867- | C-C-G-P-P-C¹-A-A-G¹-P- | 32 | 736 |
| 31_192D | G-C¹-P-P-G¹-P-A¹-G¹-G- | | |
| | A-P-P¹-P-A-A-A-P-G¹-G¹- | | |
| | G¹-G¹-P-A-A-A-P-P¹-P-A- | | |
| | G-G¹-A¹-P-G¹-P-P-C¹-G- | | |
| | P-G¹-A-A-C¹-P-P-G-C-C | | |
| 4867- | C-C-G-P-P-C¹-A-A-G¹-P- | 27 | 737 |
| 31_402 | G-C¹-P-P-G¹-P-A¹-G¹-G- | | |
| | A-P-P¹-P-A-A-A-P-G¹-G¹- | | |
| | H-H-G¹-G¹-P-A-A-A-P-P¹- | | |
| | P-A-G-G¹-A¹-P-G¹-P-P- | | |
| | C¹-G-P-G¹-A-A-C¹-P-P-G- | | |
| | C-C | | |
| 4867- | C-C-G-P-P-C¹-A-A-G¹-P- | 20 | 738 |
| 31_403 | G-C¹-P-P-G¹-P-A¹-G¹-G- | | |
| | A-P-P¹-P-A-A-A-P-G¹-G¹- | | |
| | H-H-H-H-G¹-G¹-P-A-A-A- | | |
| | P-P¹-P-A-G-G¹-A¹-P-G¹- | | |
| | P-P-C¹-G-P-G¹-A-A-C¹-P- | | |
| | P-G-C-C | | |
| 4867- | C-C-G-P-P-C¹-A-A-G¹-P- | 33 | 739 |
| 31_404 | G-C¹-P-P-G¹-P-A¹-G¹-G- | | |
| | A-P-P¹-P-A-A-A-P-G¹-G¹- | | |
| | H-H-H-H-H-H-G¹-G¹-P-A- | | |
| | A-A-P-P¹-P-A-G-G¹-A¹-P- | | |
| | G¹-P-P-C¹-G-P-G¹-A-A- | | |
| | C¹-P-P-G-C-C | | |

TABLE 17
PDGF-VEGF aptamer constructs

| Aptamer | Sequence | Seq. |
|---|---|---|
| ID. No. | (5′→3′) | ID. NO. |
| 4149- | C-C-G-P-P-C-A-A-G-P-G-C-P-P- | 740 |
| 8_313 | C3-P-A-C3-G-A-P-P-P-A-A-A-P- | |
| | G-G-Z-Z-A¹-C-H-G-Z-Z-A-C-A¹- | |
| | C¹-G-C-G-Z-Z-Z-A¹-Z-A¹-G-C | |
| 4149- | C-C-G-P-P-C-A-A-G-P-G-C-P-P- | 741 |
| 8_314 | C3-P-A-C3-G-A-P-P-P-A-A-A-P- | |
| | G-G-H-Z-Z-A¹-C-H-G-Z-Z-A-C-A¹- | |
| | C¹-G-C-G-Z-Z-Z-A¹-Z-A¹-G-C | |
| 4149- | C-C-G-P-P-C-A-A-G-P-G-C-P-P- | 742 |
| 8_315 | C3-P-A-C3-G-A-P-P-P-A-A-A-P- | |
| | G-G-H-H-Z-Z-A¹-C-H-G-Z-Z-A-C- | |
| | A¹-C¹-G-C-G-Z-Z-Z-A¹-Z-A¹-G-C | |
| 4149- | C-C-G-P-P-C-A-A-G-P-G-C-P-P- | 743 |
| 8_316 | C3-P-A-C3-G-A-P-P-P-A-A-A-P- | |
| | G-G-H-H-H-Z-Z-A¹-C-H-G-Z-Z-A- | |
| | C-A¹-C¹-G-C-G-Z-Z-Z-A¹-Z-A¹- | |
| | G-C | |
| 4149- | Z-Z-A¹-C-H-G-Z-Z-A-C-A¹-C¹-G- | 744 |
| 8_317 | C-G-Z-Z-Z-A¹-Z-A¹-G-C-G¹-C-C- | |
| | G-P-P-C-A-A-G-P-G-C-P-P-C3- | |
| | P-A-C3-G-A-P-P-P-A-A-A-P-G | |
| 4149- | Z-Z-A¹-C-H-G-Z-Z-A-C-A¹-C¹-G- | 745 |
| 8_318 | C-G-Z-Z-Z-A¹-Z-A¹-G-C-G¹-H-C- | |
| | C-G-P-P-C-A-A-G-P-G-C-P-P-C3- | |
| | P-A-C3-G-A-P-P-P-A-A-A-P-G | |
| 4149- | Z-Z-A¹-C-H-G-Z-Z-A-C-A¹-C¹-G- | 746 |
| 8_319 | C-G-Z-Z-Z-A¹-Z-A¹-G-C-G¹-H-H- | |
| | C-C-G-P-P-C-A-A-G-P-G-C-P-P- | |
| | C3-P-A-C3-G-A-P-P-P-A-A-A-P-G | |
| 4149- | Z-Z-A¹-C-H-G-Z-Z-A-C-A¹-C¹-G- | 747 |
| 8_320 | C-G-Z-Z-Z-A¹-Z-A¹-G-C-G¹-H-H- | |
| | H-C-C-G-P-P-C-A-A-G-P-G-C-P- | |
| | P-C3-P-A-C3-G-A-P-P-P-A-A-A- | |
| | P-G | |

TABLE 18
Binding affinity and in vitro activity of PDGF-VEGF aptamer constructs.

| | | | Hs27 | | | |
|---|---|---|---|---|---|---|
| | | | PDGFRβ | | | |
| | | PDGF-BB | % Activity | PDGF-AB | VEGF | VEGF121 |
| Target | SeqID | Kd (M) | Remaining | Kd (M) | Kd (M) | Kd (M) |
| PDGF-BB | 4149-8_39 | 8.75E−11 | | 4.76E−11 | 1.00E−06 | 1.00E−06 |
| PDGF-BB | 4149-8_130 | 7.59E−11 | | 1.41E−10 | 1.00E−06 | 1.00E−06 |
| PDGF-BB | 4149-8_273 | 6.14E−11 | | 1.89E−10 | 1.00E−06 | 1.00E−06 |
| VEGF121 | 4867-31_51 | 1.26E−07 | | 1.48E−08 | 1.96E−10 | 7.28E−10 |
| VEGF121 | 4867-31_183 | 1.95E−07 | | 1.45E−08 | 1.38E−10 | 6.65E−10 |
| Both | 4149-8_313 | 9.33E−11 | 5% | 1.65E−10 | 2.58E−10 | 4.31E−09 |
| Both | 4149-8_314 | 1.36E−10 | 2% | 1.11E−10 | 1.43E−10 | 1.55E−09 |
| Both | 4149-8_315 | 1.19E−10 | 2% | 1.23E−10 | 8.60E−11 | 7.58E−10 |
| Both | 4149-8_316 | 8.97E−11 | 2% | 1.37E−10 | 1.57E−10 | 5.00E−10 |
| Both | 4149-8_317 | 6.38E−11 | 58% | | | 8.09E−11 |
| Both | 4149-8_318 | 4.31E−11 | 43% | 8.18E−11 | 2.70E−10 | 2.47E−09 |
| Both | 4149-8_319 | 2.42E−11 | 17% | 3.02E−11 | 1.25E−10 | 1.07E−09 |
| Both | 4149-8_320 | 1.50E−11 | 13% | 4.93E−11 | 7.68E−11 | 4.22E−10 |

TABLE 19
PDGF/VEGF aptamer construct 4149-8_401

| | | Seq. |
|---|---|---|
| Aptamer | Sequence | ID. |
| ID. No. | (5′→3′) | NO. |
| 4149- | Z-M-A¹-C-H-G-Z¹-Z-A-C-C3-C¹-G-C-G- | 748 |
| 8_401 | Z-Z-Z¹-A¹-Z-A¹-G-C-G¹-H-H-H-C-C-G- | |
| | P-P-C¹-A-A-G¹-P-G-C¹-P-P-G¹-P-A¹- | |
| | G¹-G-A-P-P¹-P-A-A-A-P-G¹-G¹ | |

TABLE 20
Binding affinity of PDGF/VEGF aptamer construct 4149-8_401

| | | PDGF-BB | PDGF-AB | VEGF165 | VEGF121 |
|---|---|---|---|---|---|
| Target | Seq ID | Kd (M) | Kd (M) | Kd (M) | Kd (M) |
| Both | 4149-8_320 | 1.50E−11 | 4.93E−11 | 7.68E−11 | 4.22E−10 |
| Both | 4149-8_401 | 1.51E−11 | 1.93E−10 | 2.77E−10 | 3.74E−11 |

TABLE 21
Binding affinities of PDGF/VEGF aptamer constructs
comprising 4149-8_379 and 4867-31_192

| | | | |
|---|---|---|---|
| 4149-8_401 | PDGF_379 | HHH | VEGF_192 |
| 4149-8_408 | VEGF_192 | H | PDGF_379 |
| 4149-8_409 | VEGF_192 | HH | PDGF_379 |
| 4149-8_410 | VEGF_192 | HHH | PDGF_379 |
| 4149-8_411 | VEGF_192 | HHHH | PDGF_379 |
| 4149-8_412 | VEGF_192 | HHHHH | PDGF_379 |
| 4149-8_413 | VEGF_192 | HHHHHH | PDGF_379 |
| 4149-8_414 | PDGF_379 | HH | VEGF_192 |
| 4149-8_415 | PDGF_379 | HHHH | VEGF_192 |
| 4149-8_416 | PDGF_379 | HHHHH | VEGF_192 |
| 4149-8_417 | PDGF_379 | HHHHHH | VEGF_192 |

| | Kd (M) | | |
|---|---|---|---|
| Aptamer ID. No. | PDGF-BB | VEGF121 | VEGF165 |
| E10030 | 4.7E−11 | NB | NB |
| OH-4149-8_379 | 2.0E−11 | NB | NB |
| OH-4867-31_192 | 5.7E−08 | 2.3E−11 | 4.1E−11 |
| N-4149-8_401 | 5.6E−12 | 2.7E−11 | 2.5E−11 |
| OH-4149-8_408 | 4.3E−11 | 4.4E−11 | 4.1E−11 |
| OH-4149-8_409 | 6.0E−10 | 2.6E−11 | 2.9E−11 |
| OH-4149-8_410 | 2.0E−11 | 2.6E−11 | 3.3E−11 |
| OH-4149-8_411 | 7.2E−12 | 2.0E−11 | 4.5E−11 |
| OH-4149-8_412 | 8.6E−12 | 2.0E−11 | 4.5E−11 |
| OH-4149-8_413 | 1.0E−11 | 4.0E−11 | 6.3E−11 |
| OH-4149-8_414 | 1.0E−11 | 2.3E−11 | 5.1E−11 |
| OH-4149-8_415 | 8.1E−12 | 4.0E−11 | 3.0E−11 |
| OH-4149-8_416 | 8.9E−12 | 4.1E−11 | 3.0E−11 |
| OH-4149-8_417 | 1.1E−11 | 4.3E−11 | 6.5E−11 |

TABLE 22
Binding affinities of PDGF/VEGF
aptamer constructs comprising
5169-4_26 and 4867-31_192.

| | | K_{d} | K_{d} | Seq. |
|---|---|---|---|---|
| Aptamer | Sequence | (nM) | (nM) | ID. |
| ID. No. | (5′→3′) | PDGF | VEGF121 | NO. |
| 5169- | C-C-G-P-P-C¹-A-A- | 0.00020 | 0.052 | 749 |
| 4_93 | G¹-P-G-C¹-P-P-G¹- | | | |
| | P-A¹-G¹-G-A-P-P¹- | | | |
| | P-A-A-A-P-G¹-G¹-H- | | | |
| | H-H-H-H-H-C-G-A- | | | |
| | C-A-G-C-A-P-G-P- | | | |
| | A-P-G-C-A-C-A-P- | | | |
| | C-P | | | |
| 5169- | C-C-G-P-P-C¹-A-A- | 0.00050 | 0.066 | 750 |
| 4_94 | G¹-P-G-C¹-P-P-G¹- | | | |
| | P-A¹-G¹-G-A-P-P¹- | | | |
| | P-A-A-A-P-G¹-G¹-H- | | | |
| | H-H-H-H-C-G-A-C- | | | |
| | A-G-C-A-P-G-P-A- | | | |
| | P-G-C-A-C-A-P-C-P | | | |
| 5169- | C-C-G-P-P-C¹-A-A- | 0.0012 | 0.043 | 751 |
| 4_95 | G¹-P-G-C¹-P-P-G¹- | | | |
| | P-A¹-G¹-G-A-P-P¹- | | | |
| | P-A-A-A-P-G¹-G¹-H- | | | |
| | H-H-H-C-G-A-C-A- | | | |
| | G-C-A-P-G-P-A-P- | | | |
| | G-C-A-C-A-P-C-P | | | |
| 5169- | C-C-G-P-P-C¹-A-A- | 0.0045 | 0.076 | 752 |
| 4_96 | G¹-P-G-C¹-P-P-G¹- | | | |
| | P-A¹-G¹-G-A-P-P¹- | | | |
| | P-A-A-A-P-G¹-G¹-H- | | | |
| | H-H-C-G-A-C-A-G- | | | |
| | C-A-P-G-P-A-P-G- | | | |
| | C-A-C-A-P-C-P | | | |
| 5169- | C-C-G-P-P-C¹-A-A- | 0.0037 | 0.10 | 753 |
| 4_97 | G¹-P-G-C¹-P-P-G¹- | | | |
| | P-A¹-G¹-G-A-P-P¹- | | | |
| | P-A-A-A-P-G¹-G¹-H- | | | |
| | H-C-G-A-C-A-G-C- | | | |
| | A-P-G-P-A-P-G-C- | | | |
| | A-C-A-P-C-P | | | |
| 5169- | C-C-G-P-P-C¹-A-A- | 0.0053 | 0.14 | 754 |
| 4_98 | G¹-P-G-C¹-P-P-G¹- | | | |
| | P-A¹-G¹-G-A-P-P¹- | | | |
| | P-A-A-A-P-G¹-G¹-H- | | | |
| | C-G-A-C-A-G-C-A- | | | |
| | P-G-P-A-P-G-C-A- | | | |
| | C-A-P-C-P | | | |
| 5169- | C-G-A-C-A-G-C-A- | 0.0021 | 0.120 | 755 |
| 4_99 | P-G-P-A-P-G-C-A- | | | |
| | C-A-P-C-P-H-H-H- | | | |
| | H-H-H-C-C-G-P-P- | | | |
| | C¹-A-A-G¹-P-G-C¹- | | | |
| | P-P-G¹-P-A¹-G¹-G- | | | |
| | A-P-P¹-P-A-A-A-P- | | | |
| | G¹-G¹ | | | |
| 5169- | C-G-A-C-A-G-C-A- | 0.0015 | 0.056 | 756 |
| 4_100 | P-G-P-A-P-G-C-A- | | | |
| | C-A-P-C-P-H-H-H- | | | |
| | H-H-C-C-G-P-P-C¹- | | | |
| | A-A-G¹-P-G-C¹-P- | | | |
| | P-G¹-P-A¹-G¹-G-A- | | | |
| | P-P¹-P-A-A-A-P- | | | |
| | G¹-G¹ | | | |
| 5169- | C-G-A-C-A-G-C-A- | 0.00050 | 0.13 | 757 |
| 4_101 | P-G-P-A-P-G-C-A- | | | |
| | C-A-P-C-P-H-H-H- | | | |
| | H-C-C-G-P-P-C¹-A- | | | |
| | A-G¹-P-G-C¹-P-P- | | | |
| | G¹-P-A¹-G¹-G-A-P- | | | |
| | P¹-P-A-A-A-P-G¹-G¹ | | | |
| 5169- | C-G-A-C-A-G-C-A- | 0.011 | 0.14 | 758 |
| 4_102 | P-G-P-A-P-G-C-A- | | | |
| | C-A-P-C-P-H-H-H- | | | |
| | C-C-G-P-P-C¹-A-A- | | | |
| | G¹-P-G-C¹-P-P-G¹- | | | |
| | P-A¹-G¹-G-A-P-P¹- | | | |
| | P-A-A-A-A-P-G¹-G¹ | | | |
| 5169- | C-G-A-C-A-G-C-A- | 0.0061 | 0.12 | 759 |
| 4_103 | P-G-P-A-P-G-C-A- | | | |
| | C-A-P-C-P-H-H-C- | | | |
| | C-G-P-P-C¹-A-A-G¹- | | | |
| | P-G-C¹-P-P-G¹-P- | | | |
| | A¹-G¹-G-A-P-P¹-P- | | | |
| | A-A-A-P-G¹-G¹ | | | |
| 5169- | C-G-A-C-A-G-C-A- | 0.0046 | 0.28 | 760 |
| 4_104 | P-G-P-A-P-G-C-A- | | | |
| | C-A-P-C-P-H-C-C- | | | |
| | G-P-P-C¹-A-A-G¹- | | | |
| | P-G-C¹-P-P-G¹-P- | | | |
| | A¹-G¹-G-A-P-P¹-P- | | | |
| | A-A-A-P-G¹-G¹ | | | |

TABLE 23
Aptamers and aptamer constructs tested in Ocular PK Studies.

| Test Article | Sequence ID | Target(s) | PEG |
|---|---|---|---|
| SL1010 | 4867-31_192 | VEGF | 40 kDa |
| SL1011 | 4149-8_379 | PDGF | 40 kDa |
| SL1012 | 4149-8_401 | VEGF and PDGF | 20 kDa |
| SL1013 | 4149-8_401 | VEGF and PDGF | 40 kDa |

TABLE 24
Concentrations in the Vitreous Humor For Aptamer and Aptamer
Constructs in the Ocular Pharmacokinetic Studies.

| | | SL1010 | SL1011 | SL1012 | SL1013 |
|---|---|---|---|---|---|
| Time | EYE | Concen- | Concen- | Concen- | Concen- |
| Point | (OS or | tration | tration | tration | tration |
| (hours) | OD) | (μg/mL) | (μg/mL) | (μg/mL) | (μg/mL) |
| 2 | OS | 296 | 280 | 538 | 563 |
| 2 | OD | 296 | 298 | 682 | 634 |
| 24 | OS | 195 | 164 | 330 | 520 |
| 24 | OD | 198 | 165 | 433 | 493 |
| 48 | OS | 188 | 131 | 359 | 376 |
| 48 | OD | 207 | 116 | 267 | 336 |
| 96 | OS | 146 | 96.3 | 227 | 307 |
| 96 | OD | 139 | 97.8 | 204 | 277 |
| 192 | OS | 70.2 | 16.8 | 92.8 | 145 |
| 192 | OD | 82.4 | 18.2 | 67.8 | 132 |

OS—Oculus Sinister;
OD—Oculus Dexter

TABLE 25
Vitreous Humor Half-Life for Aptamer and
Aptamer Constructs Following a Single Bilateral
Intravitreous Dose to NZW Rabbits.

| Test | Half-life | 95% Confidence |
|---|---|---|
| Article | (hours) | Interval |
| SL1010 | 105 | 90-128 |
| SL1011 | 47 | 42-55 |
| SL1012 | 69 | 58-85 |
| SL1013 | 92 | 81-106 |

The application's sequence listing, which the Patent Office published only in electronic form, follows.

SEQUENCE LISTING (762 sequences)

SEQ ID NO: 1 - DNA, 75 bp, Artificial Sequence
  Synthetic
  misc_feature (18)..(19): n is 5-(N-benzylcarboxyamide)-2'-deoxyuridine
  misc_feature (25)..(25): n is 5-(N-benzylcarboxyamide)-2'-deoxyuridine
  misc_feature (29)..(30): n is 5-(N-benzylcarboxyamide)-2'-deoxyuridine
  misc_feature (38)..(40): n is 5-(N-benzylcarboxyamide)-2'-deoxyuridine
  misc_feature (42)..(42): n is 5-(N-benzylcarboxyamide)-2'-deoxyuridine
  misc_feature (47)..(47): n is 5-(N-benzylcarboxyamide)-2'-deoxyuridine
  misc_feature (57)..(57): n is 5-(N-benzylcarboxyamide)-2'-deoxyuridine
cgccctcgtcccatctcnnacgacnacgnnacacgcgnnnanagcgncaacccgagngaacaccaaccgagaacg

SEQ ID NO: 2 - DNA, 50 bp, Artificial Sequence
  Synthetic
  misc_feature (6)..(7): n is 5-(N-benzylcarboxyamide)-2'-deoxyuridine
  misc_feature (13)..(13): n is 5-(N-benzylcarboxyamide)-2'-deoxyuridine
  misc_feature (17)..(18): n is 5-(N-benzylcarboxyamide)-2'-deoxyuridine
  misc_feature (26)..(28): n is 5-(N-benzylcarboxyamide)-2'-deoxyuridine
  misc_feature (30)..(30): n is 5-(N-benzylcarboxyamide)-2'-deoxyuridine
  misc_feature (35)..(35): n is 5-(N-benzylcarboxyamide)-2'-deoxyuridine
  misc_feature (45)..(45): n is 5-(N-benzylcarboxyamide)-2'-deoxyuridine
atctcnnacgacnacgnnacacgcgnnnanagcgncaacccgagngaaca

SEQ ID NO: 3 - DNA, 48 bp, Artificial Sequence
  Synthetic
  misc_feature (6)..(7): n is 5-(N-benzylcarboxyamide)-2'-deoxyuridine
  misc_feature (13)..(13): n is 5-(N-benzylcarboxyamide)-2'-deoxyuridine
  misc_feature (17)..(18): n is 5-(N-benzylcarboxyamide)-2'-deoxyuridine
  misc_feature (26)..(28): n is 5-(N-benzylcarboxyamide)-2'-deoxyuridine
  misc_feature (30)..(30): n is 5-(N-benzylcarboxyamide)-2'-deoxyuridine
  misc_feature (35)..(35): n is 5-(N-benzylcarboxyamide)-2'-deoxyuridine
  misc_feature (45)..(45): n is 5-(N-benzylcarboxyamide)-2'-deoxyuridine
atctcnnacgacnacgnnacacgcgnnnanagcgncaacccgagngaa

SEQ ID NO: 4 - DNA, 46 bp, Artificial Sequence
  Synthetic
  misc_feature (6)..(7): n is 5-(N-benzylcarboxyamide)-2'-deoxyuridine
  misc_feature (13)..(13): n is 5-(N-benzylcarboxyamide)-2'-deoxyuridine
  misc_feature (17)..(18): n is 5-(N-benzylcarboxyamide)-2'-deoxyuridine
  misc_feature (26)..(28): n is 5-(N-benzylcarboxyamide)-2'-deoxyuridine
  misc_feature (30)..(30): n is 5-(N-benzylcarboxyamide)-2'-deoxyuridine
  misc_feature (35)..(35): n is 5-(N-benzylcarboxyamide)-2'-deoxyuridine
  misc_feature (45)..(45): n is 5-(N-benzylcarboxyamide)-2'-deoxyuridine
atctcnnacgacnacgnnacacgcgnnnanagcgncaacccgagng

SEQ ID NO: 5 - DNA, 44 bp, Artificial Sequence
  Synthetic
  misc_feature (6)..(7): n is 5-(N-benzylcarboxyamide)-2'-deoxyuridine
  misc_feature (13)..(13): n is 5-(N-benzylcarboxyamide)-2'-deoxyuridine
  misc_feature (17)..(18): n is 5-(N-benzylcarboxyamide)-2'-deoxyuridine
  misc_feature (26)..(28): n is 5-(N-benzylcarboxyamide)-2'-deoxyuridine
  misc_feature (30)..(30): n is 5-(N-benzylcarboxyamide)-2'-deoxyuridine
  misc_feature (35)..(35): n is 5-(N-benzylcarboxyamide)-2'-deoxyuridine
atctcnnacgacnacgnnacacgcgnnnanagcgncaacccgag

SEQ ID NO: 6 - DNA, 42 bp, Artificial Sequence
  Synthetic
  misc_feature (6)..(7): n is 5-(N-benzylcarboxyamide)-2'-deoxyuridine
  misc_feature (13)..(13): n is 5-(N-benzylcarboxyamide)-2'-deoxyuridine
  misc_feature (17)..(18): n is 5-(N-benzylcarboxyamide)-2'-deoxyuridine
  misc_feature (26)..(28): n is 5-(N-benzylcarboxyamide)-2'-deoxyuridine
  misc_feature (30)..(30): n is 5-(N-benzylcarboxyamide)-2'-deoxyuridine
  misc_feature (35)..(35): n is 5-(N-benzylcarboxyamide)-2'-deoxyuridine
atctcnnacgacnacgnnacacgcgnnnanagcgncaacccg

SEQ ID NO: 7 - DNA, 40 bp, Artificial Sequence
  Synthetic
  misc_feature (6)..(7): n is 5-(N-benzylcarboxyamide)-2'-deoxyuridine
  misc_feature (13)..(13): n is 5-(N-benzylcarboxyamide)-2'-deoxyuridine
  misc_feature (17)..(18): n is 5-(N-benzylcarboxyamide)-2'-deoxyuridine
  misc_feature (26)..(28): n is 5-(N-benzylcarboxyamide)-2'-deoxyuridine
  misc_feature (30)..(30): n is 5-(N-benzylcarboxyamide)-2'-deoxyuridine
  misc_feature (35)..(35): n is 5-(N-benzylcarboxyamide)-2'-deoxyuridine
atctcnnacgacnacgnnacacgcgnnnanagcgncaacc

SEQ ID NO: 8 - DNA, 38 bp, Artificial Sequence
  Synthetic
  misc_feature (6)..(7): n is 5-(N-benzylcarboxyamide)-2'-deoxyuridine
  misc_feature (13)..(13): n is 5-(N-benzylcarboxyamide)-2'-deoxyuridine
  misc_feature (17)..(18): n is 5-(N-benzylcarboxyamide)-2'-deoxyuridine
  misc_feature (26)..(28): n is 5-(N-benzylcarboxyamide)-2'-deoxyuridine
  misc_feature (30)..(30): n is 5-(N-benzylcarboxyamide)-2'-deoxyuridine
  misc_feature (35)..(35): n is 5-(N-benzylcarboxyamide)-2'-deoxyuridine
atctcnnacgacnacgnnacacgcgnnnanagcgncaa

SEQ ID NO: 9 - DNA, 36 bp, Artificial Sequence
  Synthetic
  misc_feature (6)..(7): n is 5-(N-benzylcarboxyamide)-2'-deoxyuridine
  misc_feature (13)..(13): n is 5-(N-benzylcarboxyamide)-2'-deoxyuridine
  misc_feature (17)..(18): n is 5-(N-benzylcarboxyamide)-2'-deoxyuridine
  misc_feature (26)..(28): n is 5-(N-benzylcarboxyamide)-2'-deoxyuridine
  misc_feature (30)..(30): n is 5-(N-benzylcarboxyamide)-2'-deoxyuridine
  misc_feature (35)..(35): n is 5-(N-benzylcarboxyamide)-2'-deoxyuridine
atctcnnacgacnacgnnacacgcgnnnanagcgnc

SEQ ID NO: 10 - DNA, 48 bp, Artificial Sequence
  Synthetic
  misc_feature (4)..(5): n is 5-(N-benzylcarboxyamide)-2'-deoxyuridine
  misc_feature (11)..(11): n is 5-(N-benzylcarboxyamide)-2'-deoxyuridine
  misc_feature (15)..(16): n is 5-(N-benzylcarboxyamide)-2'-deoxyuridine
  misc_feature (24)..(26): n is 5-(N-benzylcarboxyamide)-2'-deoxyuridine
  misc_feature (28)..(28): n is 5-(N-benzylcarboxyamide)-2'-deoxyuridine
  misc_feature (33)..(33): n is 5-(N-benzylcarboxyamide)-2'-deoxyuridine
  misc_feature (43)..(43): n is 5-(N-benzylcarboxyamide)-2'-deoxyuridine
ctcnnacgacnacgnnacacgcgnnnanagcgncaacccgagngaaca

SEQ ID NO: 11 - DNA, 46 bp, Artificial Sequence
  Synthetic
  misc_feature (2)..(3): n is 5-(N-benzylcarboxyamide)-2'-deoxyuridine
  misc_feature (9)..(9): n is 5-(N-benzylcarboxyamide)-2'-deoxyuridine
  misc_feature (13)..(14): n is 5-(N-benzylcarboxyamide)-2'-deoxyuridine
  misc_feature (22)..(24): n is 5-(N-benzylcarboxyamide)-2'-deoxyuridine
  misc_feature (26)..(26): n is 5-(N-benzylcarboxyamide)-2'-deoxyuridine
  misc_feature (31)..(31): n is 5-(N-benzylcarboxyamide)-2'-deoxyuridine
  misc_feature (41)..(41): n is 5-(N-benzylcarboxyamide)-2'-deoxyuridine
cnnacgacnacgnnacacgcgnnnanagcgncaacccgagngaaca

SEQ ID NO: 12 - DNA, 44 bp, Artificial Sequence
  Synthetic
  misc_feature (1)..(1): n is 5-(N-benzylcarboxyamide)-2'-deoxyuridine
  misc_feature (7)..(7): n is 5-(N-benzylcarboxyamide)-2'-deoxyuridine
  misc_feature (11)..(12): n is 5-(N-benzylcarboxyamide)-2'-deoxyuridine
  misc_feature (20)..(22): n is 5-(N-benzylcarboxyamide)-2'-deoxyuridine
  misc_feature (24)..(24): n is 5-(N-benzylcarboxyamide)-2'-deoxyuridine
  misc_feature (29)..(29): n is 5-(N-benzylcarboxyamide)-2'-deoxyuridine
  misc_feature (39)..(39): n is 5-(N-benzylcarboxyamide)-2'-deoxyuridine
nacgacnacgnnacacgcgnnnanagcgncaacccgagngaaca

SEQ ID NO: 13 - DNA, 45 bp, Artificial Sequence
  Synthetic
  misc_feature (2)..(3): n is 5-(N-benzylcarboxyamide)-2'-deoxyuridine
  misc_feature (9)..(9): n is 5-(N-benzylcarboxyamide)-2'-deoxyuridine
  misc_feature (13)..(14): n is 5-(N-benzylcarboxyamide)-2'-deoxyuridine
  misc_feature (22)..(24): n is 5-(N-benzylcarboxyamide)-2'-deoxyuridine
  misc_feature (26)..(26): n is 5-(N-benzylcarboxyamide)-2'-deoxyuridine
  misc_feature (31)..(31): n is 5-(N-benzylcarboxyamide)-2'-deoxyuridine
  misc_feature (41)..(41): n is 5-(N-benzylcarboxyamide)-2'-deoxyuridine
cnnacgacnacgnnacacgcgnnnanagcgncaacccgagngaac

SEQ ID NO: 14 - DNA, 44 bp, Artificial Sequence
  Synthetic
  misc_feature (2)..(3): n is 5-(N-benzylcarboxyamide)-2'-deoxyuridine
  misc_feature (9)..(9): n is 5-(N-benzylcarboxyamide)-2'-deoxyuridine
  misc_feature (13)..(14): n is 5-(N-benzylcarboxyamide)-2'-deoxyuridine
  misc_feature (22)..(24): n is 5-(N-benzylcarboxyamide)-2'-deoxyuridine
  misc_feature (26)..(26): n is 5-(N-benzylcarboxyamide)-2'-deoxyuridine
  misc_feature (31)..(31): n is 5-(N-benzylcarboxyamide)-2'-deoxyuridine
  misc_feature (41)..(41): n is 5-(N-benzylcarboxyamide)-2'-deoxyuridine
cnnacgacnacgnnacacgcgnnnanagcgncaacccgagngaa

SEQ ID NO: 15 - DNA, 43 bp, Artificial Sequence
  Synthetic
  misc_feature (2)..(3): n is 5-(N-benzylcarboxyamide)-2'-deoxyuridine
  misc_feature (9)..(9): n is 5-(N-benzylcarboxyamide)-2'-deoxyuridine
  misc_feature (13)..(14): n is 5-(N-benzylcarboxyamide)-2'-deoxyuridine
  misc_feature (22)..(24): n is 5-(N-benzylcarboxyamide)-2'-deoxyuridine
  misc_feature (26)..(26): n is 5-(N-benzylcarboxyamide)-2'-deoxyuridine
  misc_feature (31)..(31): n is 5-(N-benzylcarboxyamide)-2'-deoxyuridine
  misc_feature (41)..(41): n is 5-(N-benzylcarboxyamide)-2'-deoxyuridine
cnnacgacnacgnnacacgcgnnnanagcgncaacccgagnga

SEQ ID NO: 16 - DNA, 42 bp, Artificial Sequence
  Synthetic
  misc_feature (2)..(3): n is 5-(N-benzylcarboxyamide)-2'-deoxyuridine
  misc_feature (9)..(9): n is 5-(N-benzylcarboxyamide)-2'-deoxyuridine
  misc_feature (13)..(14): n is 5-(N-benzylcarboxyamide)-2'-deoxyuridine
  misc_feature (22)..(24): n is 5-(N-benzylcarboxyamide)-2'-deoxyuridine
  misc_feature (26)..(26): n is 5-(N-benzylcarboxyamide)-2'-deoxyuridine
  misc_feature (31)..(31): n is 5-(N-benzylcarboxyamide)-2'-deoxyuridine
  misc_feature (41)..(41): n is 5-(N-benzylcarboxyamide)-2'-deoxyuridine
cnnacgacnacgnnacacgcgnnnanagcgncaacccgagng

SEQ ID NO: 17 - DNA, 41 bp, Artificial Sequence
  Synthetic
  misc_feature (2)..(3): n is 5-(N-benzylcarboxyamide)-2'-deoxyuridine
  misc_feature (9)..(9): n is 5-(N-benzylcarboxyamide)-2'-deoxyuridine
  misc_feature (13)..(14): n is 5-(N-benzylcarboxyamide)-2'-deoxyuridine
  misc_feature (22)..(24): n is 5-(N-benzylcarboxyamide)-2'-deoxyuridine
  misc_feature (26)..(26): n is 5-(N-benzylcarboxyamide)-2'-deoxyuridine
  misc_feature (31)..(31): n is 5-(N-benzylcarboxyamide)-2'-deoxyuridine
cnnacgacnacgnnacacgcgnnnanagcgncaacccgagt

SEQ ID NO: 18 - DNA, 40 bp, Artificial Sequence
  Synthetic
  misc_feature (2)..(3): n is 5-(N-benzylcarboxyamide)-2'-deoxyuridine
  misc_feature (9)..(9): n is 5-(N-benzylcarboxyamide)-2'-deoxyuridine
  misc_feature (13)..(14): n is 5-(N-benzylcarboxyamide)-2'-deoxyuridine
  misc_feature (22)..(24): n is 5-(N-benzylcarboxyamide)-2'-deoxyuridine
  misc_feature (26)..(26): n is 5-(N-benzylcarboxyamide)-2'-deoxyuridine
  misc_feature (31)..(31): n is 5-(N-benzylcarboxyamide)-2'-deoxyuridine
cnnacgacnacgnnacacgcgnnnanagcgncaacccgag

SEQ ID NO: 19 - DNA, 39 bp, Artificial Sequence
  Synthetic
  misc_feature (2)..(3): n is 5-(N-benzylcarboxyamide)-2'-deoxyuridine
  misc_feature (9)..(9): n is 5-(N-benzylcarboxyamide)-2'-deoxyuridine
  misc_feature (13)..(14): n is 5-(N-benzylcarboxyamide)-2'-deoxyuridine
  misc_feature (22)..(24): n is 5-(N-benzylcarboxyamide)-2'-deoxyuridine
  misc_feature (26)..(26): n is 5-(N-benzylcarboxyamide)-2'-deoxyuridine
  misc_feature (31)..(31): n is 5-(N-benzylcarboxyamide)-2'-deoxyuridine
cnnacgacnacgnnacacgcgnnnanagcgncaacccga

SEQ ID NO: 20 - DNA, 34 bp, Artificial Sequence
  Synthetic
  misc_feature (4)..(5): n is 5-(N-benzylcarboxyamide)-2'-deoxyuridine
  misc_feature (11)..(11): n is 5-(N-benzylcarboxyamide)-2'-deoxyuridine
  misc_feature (15)..(16): n is 5-(N-benzylcarboxyamide)-2'-deoxyuridine
  misc_feature (24)..(26): n is 5-(N-benzylcarboxyamide)-2'-deoxyuridine
  misc_feature (28)..(28): n is 5-(N-benzylcarboxyamide)-2'-deoxyuridine
  misc_feature (33)..(33): n is 5-(N-benzylcarboxyamide)-2'-deoxyuridine
ctcnnacgacnacgnnacacgcgnnnanagcgnc

SEQ ID NO: 21 - DNA, 32 bp, Artificial Sequence
  Synthetic
  misc_feature (2)..(3): n is 5-(N-benzylcarboxyamide)-2'-deoxyuridine
  misc_feature (9)..(9): n is 5-(N-benzylcarboxyamide)-2'-deoxyuridine
  misc_feature (13)..(14): n is 5-(N-benzylcarboxyamide)-2'-deoxyuridine
  misc_feature (22)..(24): n is 5-(N-benzylcarboxyamide)-2'-deoxyuridine
  misc_feature (26)..(26): n is 5-(N-benzylcarboxyamide)-2'-deoxyuridine
  misc_feature (31)..(31): n is 5-(N-benzylcarboxyamide)-2'-deoxyuridine
cnnacgacnacgnnacacgcgnnnanagcgnc

SEQ ID NO: 22 - DNA, 31 bp, Artificial Sequence
  Synthetic
  misc_feature (2)..(3): n is 5-(N-benzylcarboxyamide)-2'-deoxyuridine
  misc_feature (9)..(9): n is 5-(N-benzylcarboxyamide)-2'-deoxyuridine
  misc_feature (13)..(14): n is 5-(N-benzylcarboxyamide)-2'-deoxyuridine
  misc_feature (22)..(24): n is 5-(N-benzylcarboxyamide)-2'-deoxyuridine
  misc_feature (26)..(26): n is 5-(N-benzylcarboxyamide)-2'-deoxyuridine
cnnacgacnacgnnacacgcgnnnanagcgt

SEQ ID NO: 23 - DNA, 30 bp, Artificial Sequence
  Synthetic
  misc_feature (2)..(3): n is 5-(N-benzylcarboxyamide)-2'-deoxyuridine
  misc_feature (9)..(9): n is 5-(N-benzylcarboxyamide)-2'-deoxyuridine
  misc_feature (13)..(14): n is 5-(N-benzylcarboxyamide)-2'-deoxyuridine
  misc_feature (22)..(24): n is 5-(N-benzylcarboxyamide)-2'-deoxyuridine
  misc_feature (26)..(26): n is 5-(N-benzylcarboxyamide)-2'-deoxyuridine
cnnacgacnacgnnacacgcgnnnanagcg

SEQ ID NO: 24 - DNA, 29 bp, Artificial Sequence
  Synthetic
  misc_feature (2)..(3): n is 5-(N-benzylcarboxyamide)-2'-deoxyuridine
  misc_feature (9)..(9): n is 5-(N-benzylcarboxyamide)-2'-deoxyuridine
  misc_feature (13)..(14): n is 5-(N-benzylcarboxyamide)-2'-deoxyuridine
  misc_feature (22)..(24): n is 5-(N-benzylcarboxyamide)-2'-deoxyuridine
  misc_feature (26)..(26): n is 5-(N-benzylcarboxyamide)-2'-deoxyuridine
cnnacgacnacgnnacacgcgnnnanagc

SEQ ID NO: 25 - DNA, 28 bp, Artificial Sequence
  Synthetic
  misc_feature (2)..(3): n is 5-(N-benzylcarboxyamide)-2'-deoxyuridine
  misc_feature (9)..(9): n is 5-(N-benzylcarboxyamide)-2'-deoxyuridine
  misc_feature (13)..(14): n is 5-(N-benzylcarboxyamide)-2'-deoxyuridine
  misc_feature (22)..(24): n is 5-(N-benzylcarboxyamide)-2'-deoxyuridine
  misc_feature (26)..(26): n is 5-(N-benzylcarboxyamide)-2'-deoxyuridine
cnnacgacnacgnnacacgcgnnnanag

SEQ ID NO: 26 - DNA, 31 bp, Artificial Sequence
  Synthetic
  misc_feature (1)..(2): n is 5-(N-benzylcarboxyamide)-2'-deoxyuridine
  misc_feature (8)..(8): n is 5-(N-benzylcarboxyamide)-2'-deoxyuridine
  misc_feature (12)..(13): n is 5-(N-benzylcarboxyamide)-2'-deoxyuridine
  misc_feature (21)..(23): n is 5-(N-benzylcarboxyamide)-2'-deoxyuridine
  misc_feature (25)..(25): n is 5-(N-benzylcarboxyamide)-2'-deoxyuridine
  misc_feature (30)..(30): n is 5-(N-benzylcarboxyamide)-2'-deoxyuridine
nnacgacnacgnnacacgcgnnnanagcgnc

SEQ ID NO: 27 - DNA, 30 bp, Artificial Sequence
  Synthetic
  misc_feature (1)..(2): n is 5-(N-benzylcarboxyamide)-2'-deoxyuridine
  misc_feature (8)..(8): n is 5-(N-benzylcarboxyamide)-2'-deoxyuridine
  misc_feature (12)..(13): n is 5-(N-benzylcarboxyamide)-2'-deoxyuridine
  misc_feature (21)..(23): n is 5-(N-benzylcarboxyamide)-2'-deoxyuridine
  misc_feature (25)..(25): n is 5-(N-benzylcarboxyamide)-2'-deoxyuridine
nnacgacnacgnnacacgcgnnnanagcgt

SEQ ID NO: 28 - DNA, 29 bp, Artificial Sequence
  Synthetic
  misc_feature (1)..(2): n is 5-(N-benzylcarboxyamide)-2'-deoxyuridine
  misc_feature (8)..(8): n is 5-(N-benzylcarboxyamide)-2'-deoxyuridine
  misc_feature (12)..(13): n is 5-(N-benzylcarboxyamide)-2'-deoxyuridine
  misc_feature (21)..(23): n is 5-(N-benzylcarboxyamide)-2'-deoxyuridine
  misc_feature (25)..(25): n is 5-(N-benzylcarboxyamide)-2'-deoxyuridine
nnacgacnacgnnacacgcgnnnanagcg

SEQ ID NO: 29 - DNA, 28 bp, Artificial Sequence
  Synthetic
  misc_feature (1)..(2): n is 5-(N-benzylcarboxyamide)-2'-deoxyuridine
  misc_feature (8)..(8): n is 5-(N-benzylcarboxyamide)-2'-deoxyuridine
  misc_feature (12)..(13): n is 5-(N-benzylcarboxyamide)-2'-deoxyuridine
  misc_feature (21)..(23): n is 5-(N-benzylcarboxyamide)-2'-deoxyuridine
  misc_feature (25)..(25): n is 5-(N-benzylcarboxyamide)-2'-deoxyuridine
nnacgacnacgnnacacgcgnnnanagc

SEQ ID NO: 30 - DNA, 27 bp, Artificial Sequence
  Synthetic
  misc_feature (1)..(2): n is 5-(N-benzylcarboxyamide)-2'-deoxyuridine
  misc_feature (8)..(8): n is 5-(N-benzylcarboxyamide)-2'-deoxyuridine
  misc_feature (12)..(13): n is 5-(N-benzylcarboxyamide)-2'-deoxyuridine
  misc_feature (21)..(23): n is 5-(N-benzylcarboxyamide)-2'-deoxyuridine
  misc_feature (25)..(25): n is 5-(N-benzylcarboxyamide)-2'-deoxyuridine
nnacgacnacgnnacacgcgnnnanag

SEQ ID NO: 31 - DNA, 29 bp, Artificial Sequence
  Synthetic
  misc_feature (1)..(2): n is 5-(N-benzylcarboxyamide)-2'-deoxyuridine
  misc_feature (3)..(3): n is 2'-O-methyl-adenosine
  misc_feature (8)..(8): n is 5-(N-benzylcarboxyamide)-2'-deoxyuridine
  misc_feature (12)..(13): n is 5-(N-benzylcarboxyamide)-2'-deoxyuridine
  misc_feature (21)..(23): n is 5-(N-benzylcarboxyamide)-2'-deoxyuridine
  misc_feature (25)..(25): n is 5-(N-benzylcarboxyamide)-2'-deoxyuridine
nnncgacnacgnnacacgcgnnnanagcg

SEQ ID NO: 32 - DNA, 29 bp, Artificial Sequence
  Synthetic
  misc_feature (1)..(2): n is 5-(N-benzylcarboxyamide)-2'-deoxyuridine
  misc_feature (4)..(4): n is 2'-O-methyl-cytidine
  misc_feature (8)..(8): n is 5-(N-benzylcarboxyamide)-2'-deoxyuridine
  misc_feature (12)..(13): n is 5-(N-benzylcarboxyamide)-2'-deoxyuridine
  misc_feature (21)..(23): n is 5-(N-benzylcarboxyamide)-2'-deoxyuridine
  misc_feature (25)..(25): n is 5-(N-benzylcarboxyamide)-2'-deoxyuridine
nnangacnacgnnacacgcgnnnanagcg

SEQ ID NO: 33 - DNA, 29 bp, Artificial Sequence
  Synthetic
  misc_feature (1)..(2): n is 5-(N-benzylcarboxyamide)-2'-deoxyuridine
  misc_feature (5)..(5): n is 2'-O-methyl-guanosine
  misc_feature (8)..(8): n is 5-(N-benzylcarboxyamide)-2'-deoxyuridine
  misc_feature (12)..(13): n is 5-(N-benzylcarboxyamide)-2'-deoxyuridine
  misc_feature (21)..(23): n is 5-(N-benzylcarboxyamide)-2'-deoxyuridine
  misc_feature (25)..(25): n is 5-(N-benzylcarboxyamide)-2'-deoxyuridine
nnacnacnacgnnacacgcgnnnanagcg

SEQ ID NO: 34 - DNA, 29 bp, Artificial Sequence
  Synthetic
  misc_feature (1)..(2): n is 5-(N-benzylcarboxyamide)-2'-deoxyuridine
  misc_feature (6)..(6): n is 2'-O-methyl-adenosine
  misc_feature (8)..(8): n is 5-(N-benzylcarboxyamide)-2'-deoxyuridine
  misc_feature (12)..(13): n is 5-(N-benzylcarboxyamide)-2'-deoxyuridine
  misc_feature (21)..(23): n is 5-(N-benzylcarboxyamide)-2'-deoxyuridine
  misc_feature (25)..(25): n is 5-(N-benzylcarboxyamide)-2'-deoxyuridine
nnacgncnacgnnacacgcgnnnanagcg

SEQ ID NO: 35 - DNA, 29 bp, Artificial Sequence
  Synthetic
  misc_feature (1)..(2): n is 5-(N-benzylcarboxyamide)-2'-deoxyuridine
  misc_feature (7)..(7): n is 2'-O-methyl-cytidine
  misc_feature (8)..(8): n is 5-(N-benzylcarboxyamide)-2'-deoxyuridine
  misc_feature (12)..(13): n is 5-(N-benzylcarboxyamide)-2'-deoxyuridine
  misc_feature (21)..(23): n is 5-(N-benzylcarboxyamide)-2'-deoxyuridine
  misc_feature (25)..(25): n is 5-(N-benzylcarboxyamide)-2'-deoxyuridine
nnacgannacgnnacacgcgnnnanagcg

SEQ ID NO: 36 - DNA, 29 bp, Artificial Sequence
  Synthetic
  misc_feature (1)..(2): n is 5-(N-benzylcarboxyamide)-2'-deoxyuridine
  misc_feature (8)..(8): n is 5-(N-benzylcarboxyamide)-2'-deoxyuridine
  misc_feature (9)..(9): n is 2'-O-methyl-adenosine
  misc_feature (12)..(13): n is 5-(N-benzylcarboxyamide)-2'-deoxyuridine
  misc_feature (21)..(23): n is 5-(N-benzylcarboxyamide)-2'-deoxyuridine
  misc_feature (25)..(25): n is 5-(N-benzylcarboxyamide)-2'-deoxyuridine
nnacgacnncgnnacacgcgnnnanagcg

SEQ ID NO: 37 - DNA, 29 bp, Artificial Sequence
  Synthetic
  misc_feature (1)..(2): n is 5-(N-benzylcarboxyamide)-2'-deoxyuridine
  misc_feature (8)..(8): n is 5-(N-benzylcarboxyamide)-2'-deoxyuridine
  misc_feature (10)..(10): n is 2'-O-methyl-cytidine
  misc_feature (12)..(13): n is 5-(N-benzylcarboxyamide)-2'-deoxyuridine
  misc_feature (21)..(23): n is 5-(N-benzylcarboxyamide)-2'-deoxyuridine
  misc_feature (25)..(25): n is 5-(N-benzylcarboxyamide)-2'-deoxyuridine
nnacgacnangnnacacgcgnnnanagcg

SEQ ID NO: 38 - DNA, 29 bp, Artificial Sequence
  Synthetic
  misc_feature (1)..(2): n is 5-(N-benzylcarboxyamide)-2'-deoxyuridine
  misc_feature (8)..(8): n is 5-(N-benzylcarboxyamide)-2'-deoxyuridine
  misc_feature (11)..(11): n is 2'-O-methyl-guanosine
  misc_feature (12)..(13): n is 5-(N-benzylcarboxyamide)-2'-deoxyuridine
  misc_feature (21)..(23): n is 5-(N-benzylcarboxyamide)-2'-deoxyuridine
  misc_feature (25)..(25): n is 5-(N-benzylcarboxyamide)-2'-deoxyuridine
nnacgacnacnnnacacgcgnnnanagcg

SEQ ID NO: 39 - DNA, 29 bp, Artificial Sequence
  Synthetic
  misc_feature (1)..(2): n is 5-(N-benzylcarboxyamide)-2'-deoxyuridine
  misc_feature (8)..(8): n is 5-(N-benzylcarboxyamide)-2'-deoxyuridine
  misc_feature (12)..(13): n is 5-(N-benzylcarboxyamide)-2'-deoxyuridine
  misc_feature (14)..(14): n is 2'-O-methyl-adenosine
  misc_feature (21)..(23): n is 5-(N-benzylcarboxyamide)-2'-deoxyuridine
  misc_feature (25)..(25): n is 5-(N-benzylcarboxyamide)-2'-deoxyuridine
nnacgacnacgnnncacgcgnnnanagcg

SEQ ID NO: 40 - DNA, 29 bp, Artificial Sequence
  Synthetic
  misc_feature (1)..(2): n is 5-(N-benzylcarboxyamide)-2'-deoxyuridine
  misc_feature (8)..(8): n is 5-(N-benzylcarboxyamide)-2'-deoxyuridine
  misc_feature (12)..(13): n is 5-(N-benzylcarboxyamide)-2'-deoxyuridine
  misc_feature (15)..(15): n is 2'-O-methyl-cytidine
  misc_feature (21)..(23): n is 5-(N-benzylcarboxyamide)-2'-deoxyuridine
  misc_feature (25)..(25): n is 5-(N-benzylcarboxyamide)-2'-deoxyuridine
nnacgacnacgnnanacgcgnnnanagcg

SEQ ID NO: 41 - DNA, 29 bp, Artificial Sequence
  Synthetic
  misc_feature (1)..(2): n is 5-(N-benzylcarboxyamide)-2'-deoxyuridine
  misc_feature (8)..(8): n is 5-(N-benzylcarboxyamide)-2'-deoxyuridine
  misc_feature (12)..(13): n is 5-(N-benzylcarboxyamide)-2'-deoxyuridine
  misc_feature (16)..(16): n is 2'-O-methyl-adenosine
  misc_feature (21)..(23): n is 5-(N-benzylcarboxyamide)-2'-deoxyuridine
  misc_feature (25)..(25): n is 5-(N-benzylcarboxyamide)-2'-deoxyuridine
nnacgacnacgnnacncgcgnnnanagcg

SEQ ID NO: 42 - DNA, 29 bp, Artificial Sequence
  Synthetic
  misc_feature (1)..(2): n is 5-(N-benzylcarboxyamide)-2'-deoxyuridine
  misc_feature (8)..(8): n is 5-(N-benzylcarboxyamide)-2'-deoxyuridine
  misc_feature (12)..(13): n is 5-(N-benzylcarboxyamide)-2'-deoxyuridine
  misc_feature (17)..(17): n is 2'-O-methyl-cytidine
  misc_feature (21)..(23): n is 5-(N-benzylcarboxyamide)-2'-deoxyuridine
  misc_feature (25)..(25): n is 5-(N-benzylcarboxyamide)-2'-deoxyuridine
nnacgacnacgnnacangcgnnnanagcg

SEQ ID NO: 43 - DNA, 29 bp, Artificial Sequence
  Synthetic
  misc_feature (1)..(2): n is 5-(N-benzylcarboxyamide)-2'-deoxyuridine
  misc_feature (8)..(8): n is 5-(N-benzylcarboxyamide)-2'-deoxyuridine
  misc_feature (12)..(13): n is 5-(N-benzylcarboxyamide)-2'-deoxyuridine
  misc_feature (18)..(18): n is 2'-O-methyl-guanosine
  misc_feature (21)..(23): n is 5-(N-benzylcarboxyamide)-2'-deoxyuridine
  misc_feature (25)..(25): n is 5-(N-benzylcarboxyamide)-2'-deoxyuridine
nnacgacnacgnnacacncgnnnanagcg

SEQ ID NO: 44 - DNA, 29 bp, Artificial Sequence
  Synthetic
  misc_feature (1)..(2): n is 5-(N-benzylcarboxyamide)-2'-deoxyuridine
  misc_feature (8)..(8): n is 5-(N-benzylcarboxyamide)-2'-deoxyuridine
  misc_feature (12)..(13): n is 5-(N-benzylcarboxyamide)-2'-deoxyuridine
  misc_feature (19)..(19): n is 2'-O-methyl-cytidine
  misc_feature (21)..(23): n is 5-(N-benzylcarboxyamide)-2'-deoxyuridine
  misc_feature (25)..(25): n is 5-(N-benzylcarboxyamide)-2'-deoxyuridine
nnacgacnacgnnacacgngnnnanagcg

SEQ ID NO: 45 - DNA, 29 bp, Artificial Sequence
  Synthetic
  misc_feature (1)..(2): n is 5-(N-benzylcarboxyamide)-2'-deoxyuridine
  misc_feature (8)..(8): n is 5-(N-benzylcarboxyamide)-2'-deoxyuridine
  misc_feature (12)..(13): n is 5-(N-benzylcarboxyamide)-2'-deoxyuridine
  misc_feature (20)..(20): n is 2'-O-methyl-guanosine
  misc_feature (21)..(23): n is 5-(N-benzylcarboxyamide)-2'-deoxyuridine
  misc_feature (25)..(25): n is 5-(N-benzylcarboxyamide)-2'-deoxyuridine
nnacgacnacgnnacacgcnnnnanagcg

SEQ ID NO: 46 - DNA, 29 bp, Artificial Sequence
  Synthetic
  misc_feature (1)..(2): n is 5-(N-benzylcarboxyamide)-2'-deoxyuridine
  misc_feature (8)..(8): n is 5-(N-benzylcarboxyamide)-2'-deoxyuridine
  misc_feature (12)..(13): n is 5-(N-benzylcarboxyamide)-2'-deoxyuridine
  misc_feature (21)..(23): n is 5-(N-benzylcarboxyamide)-2'-deoxyuridine
  misc_feature (24)..(24): n is 2'-O-methyl-adenosine
  misc_feature (25)..(25): n is 5-(N-benzylcarboxyamide)-2'-deoxyuridine
nnacgacnacgnnacacgcgnnnnnagcg

SEQ ID NO: 47 - DNA, 29 bp, Artificial Sequence
  Synthetic
  misc_feature (1)..(2): n is 5-(N-benzylcarboxyamide)-2'-deoxyuridine
  misc_feature (8)..(8): n is 5-(N-benzylcarboxyamide)-2'-deoxyuridine
  misc_feature (12)..(13): n is 5-(N-benzylcarboxyamide)-2'-deoxyuridine
  misc_feature (21)..(23): n is 5-(N-benzylcarboxyamide)-2'-deoxyuridine
  misc_feature (25)..(25): n is 5-(N-benzylcarboxyamide)-2'-deoxyuridine
  misc_feature (26)..(26): n is 2'-O-methyl-adenosine
nnacgacnacgnnacacgcgnnnanngcg

SEQ ID NO: 48 - DNA, 29 bp, Artificial Sequence
  Synthetic
  misc_feature (1)..(2): n is 5-(N-benzylcarboxyamide)-2'-deoxyuridine
  misc_feature (8)..(8): n is 5-(N-benzylcarboxyamide)-2'-deoxyuridine
  misc_feature (12)..(13): n is 5-(N-benzylcarboxyamide)-2'-deoxyuridine
  misc_feature (21)..(23): n is 5-(N-benzylcarboxyamide)-2'-deoxyuridine
  misc_feature (25)..(25): n is 5-(N-benzylcarboxyamide)-2'-deoxyuridine
  misc_feature (27)..(27): n is 2'-O-methyl-guanosine
nnacgacnacgnnacacgcgnnnanancg

SEQ ID NO: 49 - DNA, 29 bp, Artificial Sequence
  Synthetic
  misc_feature (1)..(2): n is 5-(N-benzylcarboxyamide)-2'-deoxyuridine
  misc_feature (8)..(8): n is 5-(N-benzylcarboxyamide)-2'-deoxyuridine
  misc_feature (12)..(13): n is 5-(N-benzylcarboxyamide)-2'-deoxyuridine
  misc_feature (21)..(23): n is 5-(N-benzylcarboxyamide)-2'-deoxyuridine
  misc_feature (25)..(25): n is 5-(N-benzylcarboxyamide)-2'-deoxyuridine
  misc_feature (28)..(28): n is 2'-O-methyl-cytidine
nnacgacnacgnnacacgcgnnnanagng

SEQ ID NO: 50 - DNA, 29 bp, Artificial Sequence
  Synthetic
  misc_feature (1)..(2): n is 5-(N-benzylcarboxyamide)-2'-deoxyuridine
  misc_feature (8)..(8): n is 5-(N-benzylcarboxyamide)-2'-deoxyuridine
  misc_feature (12)..(13): n is 5-(N-benzylcarboxyamide)-2'-deoxyuridine
  misc_feature (21)..(23): n is 5-(N-benzylcarboxyamide)-2'-deoxyuridine
  misc_feature (25)..(25): n is 5-(N-benzylcarboxyamide)-2'-deoxyuridine
  misc_feature (29)..(29): n is 2'-O-methyl-guanosine
nnacgacnacgnnacacgcgnnnanagcn

SEQ ID NO: 51 - DNA, 29 bp, Artificial Sequence
  Synthetic
  misc_feature (1)..(1): n is 1,3-propane diol
  misc_feature (2)..(2): n is 5-(N-benzylcarboxyamide)-2'-deoxyuridine
  misc_feature (8)..(8): n is 5-(N-benzylcarboxyamide)-2'-deoxyuridine
  misc_feature (12)..(13): n is 5-(N-benzylcarboxyamide)-2'-deoxyuridine
  misc_feature (21)..(23): n is 5-(N-benzylcarboxyamide)-2'-deoxyuridine
  misc_feature (25)..(25): n is 5-(N-benzylcarboxyamide)-2'-deoxyuridine
nnacgacnacgnnacacgcgnnnanagcg

SEQ ID NO: 52 - DNA, 29 bp, Artificial Sequence
  Synthetic
  misc_feature (1)..(2): n is 5-(N-benzylcarboxyamide)-2'-deoxyuridine
  misc_feature (4)..(4): n is 1,3-propane diol
  misc_feature (8)..(8): n is 5-(N-benzylcarboxyamide)-2'-deoxyuridine
  misc_feature (12)..(13): n is 5-(N-benzylcarboxyamide)-2'-deoxyuridine
  misc_feature (21)..(23): n is 5-(N-benzylcarboxyamide)-2'-deoxyuridine
  misc_feature (25)..(25): n is 5-(N-benzylcarboxyamide)-2'-deoxyuridine
nnangacnacgnnacacgcgnnnanagcg

SEQ ID NO: 53 - DNA, 29 bp, Artificial Sequence
  Synthetic
  misc_feature (1)..(2): n is 5-(N-benzylcarboxyamide)-2'-deoxyuridine
  misc_feature (5)..(5): n is 1,3-propane diol
  misc_feature (8)..(8): n is 5-(N-benzylcarboxyamide)-2'-deoxyuridine
  misc_feature (12)..(13): n is 5-(N-benzylcarboxyamide)-2'-deoxyuridine
  misc_feature (21)..(23): n is 5-(N-benzylcarboxyamide)-2'-deoxyuridine
  misc_feature (25)..(25): n is 5-(N-benzylcarboxyamide)-2'-deoxyuridine
nnacnacnacgnnacacgcgnnnanagcg

SEQ ID NO: 54 - DNA, 29 bp, Artificial Sequence
  Synthetic
  misc_feature (1)..(2): n is 5-(N-benzylcarboxyamide)-2'-deoxyuridine
  misc_feature (6)..(6): n is 1,3-propane diol
  misc_feature (8)..(8): n is 5-(N-benzylcarboxyamide)-2'-deoxyuridine
  misc_feature (12)..(13): n is 5-(N-benzylcarboxyamide)-2'-deoxyuridine
  misc_feature (21)..(23): n is 5-(N-benzylcarboxyamide)-2'-deoxyuridine
  misc_feature (25)..(25): n is 5-(N-benzylcarboxyamide)-2'-deoxyuridine
nnacgncnacgnnacacgcgnnnanagcg

SEQ ID NO: 55 - DNA, 29 bp, Artificial Sequence
  Synthetic
  misc_feature (1)..(2): n is 5-(N-benzylcarboxyamide)-2'-deoxyuridine
  misc_feature (7)..(7): n is 1,3-propane diol
  misc_feature (8)..(8): n is 5-(N-benzylcarboxyamide)-2'-deoxyuridine
  misc_feature (12)..(13): n is 5-(N-benzylcarboxyamide)-2'-deoxyuridine
  misc_feature (21)..(23): n is 5-(N-benzylcarboxyamide)-2'-deoxyuridine
  misc_feature (25)..(25): n is 5-(N-benzylcarboxyamide)-2'-deoxyuridine
nnacgannacgnnacacgcgnnnanagcg

SEQ ID NO: 56 - DNA, 29 bp, Artificial Sequence
  Synthetic
  misc_feature (1)..(2): n is 5-(N-benzylcarboxyamide)-2'-deoxyuridine
  misc_feature (8)..(8): n is 1,3-propane diol
  misc_feature (12)..(13): n is 5-(N-benzylcarboxyamide)-2'-deoxyuridine
  misc_feature (21)..(23): n is 5-(N-benzylcarboxyamide)-2'-deoxyuridine
  misc_feature (25)..(25): n is 5-(N-benzylcarboxyamide)-2'-deoxyuridine
nnacgacnacgnnacacgcgnnnanagcg

SEQ ID NO: 57 - DNA, 29 bp, Artificial Sequence
  Synthetic
  misc_feature (1)..(2): n is 5-(N-benzylcarboxyamide)-2'-deoxyuridine
  misc_feature (8)..(8): n is 5-(N-benzylcarboxyamide)-2'-deoxyuridine
  misc_feature (9)..(9): n is 1,3-propane diol
  misc_feature (12)..(13): n is 5-(N-benzylcarboxyamide)-2'-deoxyuridine
  misc_feature (21)..(23): n is 5-(N-benzylcarboxyamide)-2'-deoxyuridine
  misc_feature (25)..(25): n is 5-(N-benzylcarboxyamide)-2'-deoxyuridine
nnacgacnncgnnacacgcgnnnanagcg

SEQ ID NO: 58 - DNA, 29 bp, Artificial Sequence
  Synthetic
  misc_feature (1)..(2): n is 5-(N-benzylcarboxyamide)-2'-deoxyuridine
  misc_feature (8)..(8): n is 5-(N-benzylcarboxyamide)-2'-deoxyuridine
  misc_feature (10)..(10): n is 1,3-propane diol
  misc_feature (12)..(13): n is 5-(N-benzylcarboxyamide)-2'-deoxyuridine
  misc_feature (21)..(23): n is 5-(N-benzylcarboxyamide)-2'-deoxyuridine
  misc_feature (25)..(25): n is 5-(N-benzylcarboxyamide)-2'-deoxyuridine
nnacgacnangnnacacgcgnnnanagcg

SEQ ID NO: 59 - DNA, 29 bp, Artificial Sequence
  Synthetic
  misc_feature (1)..(2): n is 5-(N-benzylcarboxyamide)-2'-deoxyuridine
  misc_feature (8)..(8): n is 5-(N-benzylcarboxyamide)-2'-deoxyuridine
  misc_feature (12)..(13): n is 5-(N-benzylcarboxyamide)-2'-deoxyuridine
  misc_feature (15)..(15): n is 1,3-propane diol
  misc_feature (21)..(23): n is 5-(N-benzylcarboxyamide)-2'-deoxyuridine
  misc_feature (25)..(25): n is 5-(N-benzylcarboxyamide)-2'-deoxyuridine
nnacgacnacgnnanacgcgnnnanagcg

SEQ ID NO: 60 - DNA, 29 bp, Artificial Sequence
  Synthetic
  misc_feature (1)..(2): n is 5-(N-benzylcarboxyamide)-2'-deoxyuridine
  misc_feature (8)..(8): n is 5-(N-benzylcarboxyamide)-2'-deoxyuridine
  misc_feature (12)..(13): n is 5-(N-benzylcarboxyamide)-2'-deoxyuridine
  misc_feature (16)..(16): n is 1,3-propane diol
  misc_feature (21)..(23): n is 5-(N-benzylcarboxyamide)-2'-deoxyuridine
  misc_feature (25)..(25): n is 5-(N-benzylcarboxyamide)-2'-deoxyuridine
nnacgacnacgnnacncgcgnnnanagcg

SEQ ID NO: 61 - DNA, 29 bp, Artificial Sequence
  Synthetic
  misc_feature (1)..(2): n is 5-(N-benzylcarboxyamide)-2'-deoxyuridine
  misc_feature (8)..(8): n is 5-(N-benzylcarboxyamide)-2'-deoxyuridine
  misc_feature (12)..(13): n is 5-(N-benzylcarboxyamide)-2'-deoxyuridine
  misc_feature (17)..(17): n is 1,3-propane diol
  misc_feature (21)..(23): n is 5-(N-benzylcarboxyamide)-2'-deoxyuridine
  misc_feature (25)..(25): n is 5-(N-benzylcarboxyamide)-2'-deoxyuridine
nnacgacnacgnnacangcgnnnanagcg

SEQ ID NO: 62 - DNA, 29 bp, Artificial Sequence
  Synthetic
  misc_feature (1)..(2): n is 5-(N-benzylcarboxyamide)-2'-deoxyuridine
  misc_feature (8)..(8): n is 5-(N-benzylcarboxyamide)-2'-deoxyuridine
  misc_feature (12)..(13): n is 5-(N-benzylcarboxyamide)-2'-deoxyuridine
  misc_feature (21)..(23): n is 5-(N-benzylcarboxyamide)-2'-deoxyuridine
  misc_feature (24)..(24): n is 1,3-propane diol
  misc_feature (25)..(25): n is 5-(N-benzylcarboxyamide)-2'-deoxyuridine
nnacgacnacgnnacacgcgnnnnnagcg

SEQ ID NO: 63 - DNA, 29 bp, Artificial Sequence
  Synthetic
  misc_feature (1)..(2): n is 5-(N-benzylcarboxyamide)-2'-deoxyuridine
  misc_feature (8)..(8): n is 5-(N-benzylcarboxyamide)-2'-deoxyuridine
  misc_feature (12)..(13): n is 5-(N-benzylcarboxyamide)-2'-deoxyuridine
  misc_feature (21)..(23): n is 5-(N-benzylcarboxyamide)-2'-deoxyuridine
  misc_feature (25)..(25): n is 5-(N-benzylcarboxyamide)-2'-deoxyuridine
  misc_feature (28)..(28): n is 1,3-propane diol
nnacgacnacgnnacacgcgnnnanagng

SEQ ID NO: 64 - DNA, 29 bp, Artificial Sequence
  Synthetic
  misc_feature (1)..(2): n is 5-(N-benzylcarboxyamide)-2'-deoxyuridine
  misc_feature (8)..(8): n is 5-(N-benzylcarboxyamide)-2'-deoxyuridine
  misc_feature (12)..(13): n is 5-(N-benzylcarboxyamide)-2'-deoxyuridine
  misc_feature (21)..(23): n is 5-(N-benzylcarboxyamide)-2'-deoxyuridine
  misc_feature (25)..(25): n is 5-(N-benzylcarboxyamide)-2'-deoxyuridine
  misc_feature (29)..(29): n is 1,3-propane diol
nnacgacnacgnnacacgcgnnnanagcn

SEQ ID NO: 65 - DNA, 29 bp, Artificial Sequence
  Synthetic
  misc_feature (1)..(2): n is 5-(N-benzylcarboxyamide)-2'-deoxyuridine
  misc_feature (3)..(3): n is 2'-O-methyl-adenosine
  misc_feature (6)..(6): n is 2'-O-methyl-adenosine
  misc_feature (8)..(8): n is 5-(N-benzylcarboxyamide)-2'-deoxyuridine
  misc_feature (9)..(9): n is 2'-O-methyl-adenosine
  misc_feature (12)..(13): n is 5-(N-benzylcarboxyamide)-2'-deoxyuridine
  misc_feature (16)..(16): n is 2'-O-methyl-adenosine
  misc_feature (18)..(18): n is 2'-O-methyl-guanosine
  misc_feature (21)..(23): n is 5-(N-benzylcarboxyamide)-2'-deoxyuridine
  misc_feature (24)..(24): n is 2'-O-methyl-adenosine
  misc_feature (25)..(25): n is 5-(N-benzylcarboxyamide)-2'-deoxyuridine
  misc_feature (26)..(26): n is 2'-O-methyl-adenosine
  misc_feature (27)..(27): n is 2'-O-methyl-guanosine
  misc_feature (28)..(28): n is 2'-O-methyl-cytidine
  misc_feature (29)..(29): n is 2'-O-methyl-guanosine
nnncgncnncgnnacncncgnnnnnnnnn

SEQ ID NO: 66 - DNA, 29 bp, Artificial Sequence
  Synthetic
  misc_feature (1)..(2): n is 5-(N-benzylcarboxyamide)-2'-deoxyuridine
  misc_feature (3)..(3): n is 2'-O-methyl-adenosine
  misc_feature (8)..(8): n is 5-(N-benzylcarboxyamide)-2'-deoxyuridine
  misc_feature (9)..(9): n is 2'-O-methyl-adenosine
  misc_feature (12)..(13): n is 5-(N-benzylcarboxyamide)-2'-deoxyuridine
  misc_feature (16)..(16): n is 2'-O-methyl-adenosine
  misc_feature (21)..(23): n is 5-(N-benzylcarboxyamide)-2'-deoxyuridine
  misc_feature (25)..(25): n is 5-(N-benzylcarboxyamide)-2'-deoxyuridine
  misc_feature (26)..(26): n is 2'-O-methyl-adenosine
  misc_feature (29)..(29): n is 2'-O-methyl-guanosine
nnncgacnncgnnacncgcgnnnanngcn

SEQ ID NO: 67 - DNA, 24 bp, Artificial Sequence
  Synthetic
  misc_feature (1)..(2): n is 5-(N-benzylcarboxyamide)-2'-deoxyuridine
  misc_feature (5)..(5): n is hexaethylene glycol
  misc_feature (7)..(8): n is 5-(N-benzylcarboxyamide)-2'-deoxyuridine
  misc_feature (16)..(18): n is 5-(N-benzylcarboxyamide)-2'-deoxyuridine
  misc_feature (20)..(20): n is 5-(N-benzylcarboxyamide)-2'-deoxyuridine
nnacngnnacacgcgnnnanagcg

SEQ ID NO: 68 - DNA, 25 bp, Artificial Sequence
  Synthetic
  misc_feature (1)..(2): n is 5-(N-benzylcarboxyamide)-2'-deoxyuridine
  misc_feature (5)..(6): n is hexaethylene glycol
  misc_feature (8)..(9): n is 5-(N-benzylcarboxyamide)-2'-deoxyuridine
  misc_feature (17)..(19): n is 5-(N-benzylcarboxyamide)-2'-deoxyuridine
  misc_feature (21)..(21): n is 5-(N-benzylcarboxyamide)-2'-deoxyuridine
nnacnngnnacacgcgnnnanagcg

SEQ ID NO: 69 - DNA, 26 bp, Artificial Sequence
  Synthetic
  misc_feature (1)..(2): n is 5-(N-benzylcarboxyamide)-2'-deoxyuridine
  misc_feature (6)..(6): n is hexaethylene glycol
  misc_feature (9)..(10): n is 5-(N-benzylcarboxyamide)-2'-deoxyuridine
  misc_feature (18)..(20): n is 5-(N-benzylcarboxyamide)-2'-deoxyuridine
  misc_feature (22)..(22): n is 5-(N-benzylcarboxyamide)-2'-deoxyuridine
nnacgncgnnacacgcgnnnanagcg

SEQ ID NO: 70 - DNA, 29 bp, Artificial Sequence
  Synthetic
  misc_feature (1)..(2): n is 5-(N-benzylcarboxyamide)-2'-deoxyuridine
  misc_feature (5)..(10): n is 1,3-propane diol
  misc_feature (12)..(13): n is 5-(N-benzylcarboxyamide)-2'-deoxyuridine
  misc_feature (21)..(23): n is 5-(N-benzylcarboxyamide)-2'-deoxyuridine
  misc_feature (25)..(25): n is 5-(N-benzylcarboxyamide)-2'-deoxyuridine
nnacnnnnnngnnacacgcgnnnanagcg

SEQ ID NO: 71 - DNA, 27 bp, Artificial Sequence
  Synthetic
  misc_feature (1)..(2): n is 5-(N-benzylcarboxyamide)-2'-deoxyuridine
  misc_feature (5)..(8): n is 1,3-propane diol
  misc_feature (10)..(11): n is 5-(N-benzylcarboxyamide)-2'-deoxyuridine
  misc_feature (19)..(21): n is 5-(N-benzylcarboxyamide)-2'-deoxyuridine
  misc_feature (23)..(23): n is 5-(N-benzylcarboxyamide)-2'-deoxyuridine
nnacnnnngnnacacgcgnnnanagcg

SEQ ID NO: 72 - DNA, 25 bp, Artificial Sequence
  Synthetic
  misc_feature (1)..(2): n is 5-(N-benzylcarboxyamide)-2'-deoxyuridine
  misc_feature (5)..(6): n is 1,3-propane diol
  misc_feature (8)..(9): n is 5-(N-benzylcarboxyamide)-2'-deoxyuridine
  misc_feature (17)..(19): n is 5-(N-benzylcarboxyamide)-2'-deoxyuridine
  misc_feature (21)..(21): n is 5-(N-benzylcarboxyamide)-2'-deoxyuridine
nnacnngnnacacgcgnnnanagcg

SEQ ID NO: 73 - DNA, 29 bp, Artificial Sequence
  Synthetic
  misc_feature (1)..(2): n is 5-(N-benzylcarboxyamide)-2'-deoxyuridine
  misc_feature (3)..(3): n is 2'-O-methyl-adenosine
  misc_feature (6)..(6): n is 1,3-propane diol
  misc_feature (8)..(9): n is 1,3-propane diol
  misc_feature (12)..(13): n is 5-(N-benzylcarboxyamide)-2'-deoxyuridine
  misc_feature (16)..(16): n is 2'-O-methyl-adenosine
  misc_feature (18)..(18): n is 2'-O-methyl-guanosine
  misc_feature (21)..(23): n is 5-(N-benzylcarboxyamide)-2'-deoxyuridine
  misc_feature (24)..(24): n is 2'-O-methyl-adenosine
  misc_feature (25)..(25): n is 5-(N-benzylcarboxyamide)-2'-deoxyuridine
  misc_feature (26)..(26): n is 2'-O-methyl-adenosine
  misc_feature (27)..(27): n is 2'-O-methyl-guanosine
  misc_feature (28)..(28): n is 2'-O-methyl-cytidine
  misc_feature (29)..(29): n is 2'-O-methyl-guanosine
nnncgncnncgnnacncncgnnnnnnnnn

SEQ ID NO: 74 - DNA, 29 bp, Artificial Sequence
  Synthetic
  misc_feature (1)..(1): n is 2'-O-methyl-uridine
  misc_feature (2)..(2): n is 5-(N-benzylcarboxyamide)-2'-deoxyuridine
  misc_feature (8)..(8): n is 5-(N-benzylcarboxyamide)-2'-deoxyuridine
  misc_feature (12)..(13): n is 5-(N-benzylcarboxyamide)-2'-deoxyuridine
  misc_feature (21)..(23): n is 5-(N-benzylcarboxyamide)-2'-deoxyuridine
  misc_feature (25)..(25): n is 5-(N-benzylcarboxyamide)-2'-deoxyuridine
nnacgacnacgnnacacgcgnnnanagcg

SEQ ID NO: 75 - DNA, 29 bp, Artificial Sequence
  Synthetic
  misc_feature (1)..(2): n is 5-(N-benzylcarboxyamide)-2'-deoxyuridine
  misc_feature (8)..(8): n is 2'-O-methyl-uridine
  misc_feature (12)..(13): n is 5-(N-benzylcarboxyamide)-2'-deoxyuridine
  misc_feature (21)..(23): n is 5-(N-benzylcarboxyamide)-2'-deoxyuridine
  misc_feature (25)..(25): n is 5-(N-benzylcarboxyamide)-2'-deoxyuridine
nnacgacnacgnnacacgcgnnnanagcg

SEQ ID NO: 76 - DNA, 29 bp, Artificial Sequence
  Synthetic
  misc_feature (1)..(2): n is 5-(N-benzylcarboxyamide)-2'-deoxyuridine
  misc_feature (8)..(8): n is 5-(N-benzylcarboxyamide)-2'-deoxyuridine
  misc_feature (12)..(12): n is 2'-O-methyl-uridine
  misc_feature (13)..(13): n is 5-(N-benzylcarboxyamide)-2'-deoxyuridine
  misc_feature (21)..(23): n is 5-(N-benzylcarboxyamide)-2'-deoxyuridine
  misc_feature (25)..(25): n is 5-(N-benzylcarboxyamide)-2'-deoxyuridine
nnacgacnacgnnacacgcgnnnanagcg

SEQ ID NO: 77 - DNA, 29 bp, Artificial Sequence
  Synthetic
  misc_feature (1)..(2): n is 5-(N-benzylcarboxyamide)-2'-deoxyuridine
  misc_feature (8)..(8): n is 5-(N-benzylcarboxyamide)-2'-deoxyuridine
  misc_feature (12)..(13): n is 5-(N-benzylcarboxyamide)-2'-deoxyuridine
  misc_feature (21)..(22): n is 5-(N-benzylcarboxyamide)-2'-deoxyuridine
  misc_feature (23)..(23): n is 2'-O-methyl-uridine
  misc_feature (25)..(25): n is 5-(N-benzylcarboxyamide)-2'-deoxyuridine
nnacgacnacgnnacacgcgnnnanagcg

SEQ ID NO: 78 - DNA, 29 bp, Artificial Sequence
  Synthetic
  misc_feature (1)..(1): n is 5-(N-benzylcarboxyamide)-2'-deoxyuridine
  misc_feature (2)..(2): n is 5-[N-(1-naphthylmethyl)carboxyamide]-2'-deoxyuridine
  misc_feature (8)..(8): n is 5-(N-benzylcarboxyamide)-2'-deoxyuridine
  misc_feature (12)..(13): n is 5-(N-benzylcarboxyamide)-2'-deoxyuridine
  misc_feature (21)..(23): n is 5-(N-benzylcarboxyamide)-2'-deoxyuridine
  misc_feature (25)..(25): n is 5-(N-benzylcarboxyamide)-2'-deoxyuridine
nnacgacnacgnnacacgcgnnnanagcg

SEQ ID NO: 79 - DNA, 29 bp, Artificial Sequence
  Synthetic
  misc_feature (1)..(2): n is 5-(N-benzylcarboxyamide)-2'-deoxyuridine
  misc_feature (8)..(8): n is 5-[N-(1-naphthylmethyl)carboxyamide]-2'-deoxyuridine
  misc_feature (12)..(13): n is 5-(N-benzylcarboxyamide)-2'-deoxyuridine
  misc_feature (21)..(23): n is 5-(N-benzylcarboxyamide)-2'-deoxyuridine
  misc_feature (25)..(25): n is 5-(N-benzylcarboxyamide)-2'-deoxyuridine
nnacgacnacgnnacacgcgnnnanagcg

SEQ ID NO: 80 - DNA, 29 bp, Artificial Sequence
  Synthetic
  misc_feature (1)..(2): n is 5-(N-benzylcarboxyamide)-2'-deoxyuridine
  misc_feature (8)..(8): n is 5-(N-benzylcarboxyamide)-2'-deoxyuridine
  misc_feature (12)..(12): n is 5-[N-(1-naphthylmethyl)carboxyamide]-2'-deoxyuridine
  misc_feature (13)..(13): n is 5-(N-benzylcarboxyamide)-2'-deoxyuridine
  misc_feature (21)..(23): n is 5-(N-benzylcarboxyamide)-2'-deoxyuridine
  misc_feature (25)..(25): n is 5-(N-benzylcarboxyamide)-2'-deoxyuridine
nnacgacnacgnnacacgcgnnnanagcg

SEQ ID NO: 81 - DNA, 29 bp, Artificial Sequence
  Synthetic
  misc_feature (1)..(2): n is 5-(N-benzylcarboxyamide)-2'-deoxyuridine
  misc_feature (8)..(8): n is 5-(N-benzylcarboxyamide)-2'-deoxyuridine
  misc_feature (12)..(12): n is 5-(N-benzylcarboxyamide)-2'-deoxyuridine
  misc_feature (13)..(13): n is 5-[N-(1-naphthylmethyl)carboxyamide]-2'-deoxyuridine
  misc_feature (21)..(23): n is 5-(N-benzylcarboxyamide)-2'-deoxyuridine
  misc_feature (25)..(25): n is 5-(N-benzylcarboxyamide)-2'-deoxyuridine
nnacgacnacgnnacacgcgnnnanagcg

SEQ ID NO: 82 - DNA, 29 bp, Artificial Sequence
  Synthetic
  misc_feature (1)..(2): n is 5-(N-benzylcarboxyamide)-2'-deoxyuridine
  misc_feature (8)..(8): n is 5-(N-benzylcarboxyamide)-2'-deoxyuridine
  misc_feature (12)..(13): n is 5-(N-benzylcarboxyamide)-2'-deoxyuridine
  misc_feature (21)..(21): n is 5-[N-(1-naphthylmethyl)carboxyamide]-2'-deoxyuridine
  misc_feature (22)..(23): n is 5-(N-benzylcarboxyamide)-2'-deoxyuridine
  misc_feature (25)..(25): n is 5-(N-benzylcarboxyamide)-2'-deoxyuridine
nnacgacnacgnnacacgcgnnnanagcg

SEQ ID NO: 83 - DNA, 29 bp, Artificial Sequence
  Synthetic
  misc_feature (1)..(2): n is 5-(N-benzylcarboxyamide)-2'-deoxyuridine
  misc_feature (8)..(8): n is 5-(N-benzylcarboxyamide)-2'-deoxyuridine
  misc_feature (12)..(13): n is 5-(N-benzylcarboxyamide)-2'-deoxyuridine
  misc_feature (21)..(21): n is 5-(N-benzylcarboxyamide)-2'-deoxyuridine
  misc_feature (22)..(22): n is 5-[N-(1-naphthylmethyl)carboxyamide]-2'-deoxyuridine
  misc_feature (23)..(23): n is 5-(N-benzylcarboxyamide)-2'-deoxyuridine
  misc_feature (25)..(25): n is 5-(N-benzylcarboxyamide)-2'-deoxyuridine
nnacgacnacgnnacacgcgnnnanagcg

SEQ ID NO: 84 - DNA, 29 bp, Artificial Sequence
  Synthetic
  misc_feature (1)..(2): n is 5-(N-benzylcarboxyamide)-2'-deoxyuridine
  misc_feature (8)..(8): n is 5-(N-benzylcarboxyamide)-2'-deoxyuridine
  misc_feature (12)..(13): n is 5-(N-benzylcarboxyamide)-2'-deoxyuridine
  misc_feature (21)..(22): n is 5-(N-benzylcarboxyamide)-2'-deoxyuridine
  misc_feature (23)..(23): n is 5-[N-(1-naphthylmethyl)carboxyamide]-2'-deoxyuridine
  misc_feature (25)..(25): n is 5-(N-benzylcarboxyamide)-2'-deoxyuridine
nnacgacnacgnnacacgcgnnnanagcg

SEQ ID NO: 85 - DNA, 29 bp, Artificial Sequence
  Synthetic
  misc_feature (1)..(2): n is 5-(N-benzylcarboxyamide)-2'-deoxyuridine
  misc_feature (8)..(8): n is 5-(N-benzylcarboxyamide)-2'-deoxyuridine
  misc_feature (12)..(13): n is 5-(N-benzylcarboxyamide)-2'-deoxyuridine
  misc_feature (21)..(23): n is 5-(N-benzylcarboxyamide)-2'-deoxyuridine
  misc_feature (25)..(25): n is 5-[N-(1-naphthylmethyl)carboxyamide]-2'-deoxyuridine
nnacgacnacgnnacacgcgnnnanagcg

SEQ ID NO: 86 - DNA, 29 bp, Artificial Sequence
  Synthetic
  misc_feature (1)..(1): n is 5-[N-(1-naphthylmethyl)carboxyamide]-2'-deoxyuridine
  misc_feature (2)..(2): n is 5-(N-benzylcarboxyamide)-2'-deoxyuridine
  misc_feature (8)..(8): n is 5-(N-benzylcarboxyamide)-2'-deoxyuridine
  misc_feature (12)..(13): n is 5-(N-benzylcarboxyamide)-2'-deoxyuridine
  misc_feature (21)..(23): n is 5-(N-benzylcarboxyamide)-2'-deoxyuridine
  misc_feature (25)..(25): n is 5-(N-benzylcarboxyamide)-2'-deoxyuridine
nnacgacnacgnnacacgcgnnnanagcg

SEQ ID NO: 87 - DNA, 29 bp, Artificial Sequence
  Synthetic
  misc_feature (1)..(2): n is 5-(N-benzylcarboxyamide)-2'-deoxyuridine
  misc_feature (8)..(8): n is 5-(N-benzylcarboxyamide)-2'-deoxyuridine
  misc_feature (12)..(13): n is 5-(N-benzylcarboxyamide)-2'-deoxyuridine
  misc_feature (21)..(23): n is 5-(N-benzylcarboxyamide)-2'-deoxyuridine
  misc_feature (25)..(25): n is 2'-O-methyl-uridine
nnacgacnacgnnacacgcgnnnanagcg

SEQ ID NO: 88 - DNA, 25 bp, Artificial Sequence
  Synthetic
  misc_feature (1)..(2): n is 5-(N-benzylcarboxyamide)-2'-deoxyuridine
  misc_feature (3)..(3): n is 2'-O-methyl-adenosine
  misc_feature (5)..(6): n is hexaethylene glycol
  misc_feature (8)..(9): n is 5-(N-benzylcarboxyamide)-2'-deoxyuridine
  misc_feature (12)..(12): n is 2'-O-methyl-adenosine
  misc_feature (17)..(19): n is 5-(N-benzylcarboxyamide)-2'-deoxyuridine
  misc_feature (21)..(21): n is 5-(N-benzylcarboxyamide)-2'-deoxyuridine
  misc_feature (22)..(22): n is 2'-O-methyl-adenosine
  misc_feature (25)..(25): n is 2'-O-methyl-guanosine
nnncnngnnacncgcgnnnanngcn

SEQ ID NO: 89 - DNA, 25 bp, Artificial Sequence
  Synthetic
  misc_feature (1)..(2): n is 5-(N-benzylcarboxyamide)-2'-deoxyuridine
  misc_feature (5)..(6): n is hexaethylene glycol
  misc_feature (8)..(9): n is 5-(N-benzylcarboxyamide)-2'-deoxyuridine
  misc_feature (17)..(17): n is 5-[N-(1-naphthylmethyl)carboxyamide]-2'-deoxyuridine
  misc_feature (18)..(19): n is 5-(N-benzylcarboxyamide)-2'-deoxyuridine
  misc_feature (21)..(21): n is 5-(N-benzylcarboxyamide)-2'-deoxyuridine
nnacnngnnacacgcgnnnanagcg

SEQ ID NO: 90 - DNA, 25 bp, Artificial Sequence
  Synthetic
  misc_feature (1)..(2): n is 5-(N-benzylcarboxyamide)-2'-deoxyuridine
  misc_feature (5)..(6): n is hexaethylene glycol
  misc_feature (8)..(8): n is 2'-O-methyl-uridine
  misc_feature (9)..(9): n is 5-(N-benzylcarboxyamide)-2'-deoxyuridine
  misc_feature (17)..(19): n is 5-(N-benzylcarboxyamide)-2'-deoxyuridine
  misc_feature (21)..(21): n is 5-(N-benzylcarboxyamide)-2'-deoxyuridine
nnacnngnnacacgcgnnnanagcg

SEQ ID NO: 91 - DNA, 25 bp, Artificial Sequence
  Synthetic
  misc_feature (1)..(2): n is 5-(N-benzylcarboxyamide)-2'-deoxyuridine
  misc_feature (3)..(3): n is 2'-O-methyl-adenosine
  misc_feature (5)..(6): n is hexaethylene glycol
  misc_feature (8)..(8): n is 2'-O-methyl-uridine
  misc_feature (9)..(9): n is 5-(N-benzylcarboxyamide)-2'-deoxyuridine
  misc_feature (12)..(12): n is 2'-O-methyl-adenosine
  misc_feature (17)..(17): n is 5-[N-(1-naphthylmethyl)carboxyamide]-2'-deoxyuridine
  misc_feature (18)..(19): n is 5-(N-benzylcarboxyamide)-2'-deoxyuridine
  misc_feature (21)..(21): n is 5-(N-benzylcarboxyamide)-2'-deoxyuridine
  misc_feature (22)..(22): n is 2'-O-methyl-adenosine
  misc_feature (25)..(25): n is 2'-O-methyl-guanosine
nnncnngnnacncgcgnnnanngcn

SEQ ID NO: 92 - DNA, 25 bp, Artificial Sequence
  Synthetic
  misc_feature (1)..(1): n is 5-(N-benzylcarboxyamide)-2'-deoxyuridine
  misc_feature (2)..(2): n is 5-[N-(1-naphthylmethyl)carboxyamide]-2'-deoxyuridine
  misc_feature (3)..(3): n is 2'-O-methyl-adenosine
  misc_feature (5)..(6): n is hexaethylene glycol
  misc_feature (8)..(9): n is 5-[N-(1-naphthylmethyl)carboxyamide]-2'-deoxyuridine
  misc_feature (12)..(12): n is 2'-O-methyl-adenosine
  misc_feature (17)..(18): n is 5-[N-(1-naphthylmethyl)carboxyamide]-2'-deoxyuridine
  misc_feature (19)..(19): n is 5-(N-benzylcarboxyamide)-2'-deoxyuridine
  misc_feature (21)..(21): n is 5-[N-(1-naphthylmethyl)carboxyamide]-2'-deoxyuridine
  misc_feature (22)..(22): n is 2'-O-methyl-adenosine
  misc_feature (25)..(25): n is 2'-O-methyl-guanosine
nnncnngnnacncgcgnnnanngcn

SEQ ID NO: 93 - DNA, 24 bp, Artificial Sequence
  Synthetic
  misc_feature (1)..(2): n is 5-(N-benzylcarboxyamide)-2'-deoxyuridine
  misc_feature (3)..(3): n is 2'-O-methyl-adenosine
  misc_feature (5)..(5): n is hexaethylene glycol
  misc_feature (7)..(8): n is 5-(N-benzylcarboxyamide)-2'-deoxyuridine
  misc_feature (11)..(11): n is 2'-O-methyl-adenosine
  misc_feature (16)..(18): n is 5-(N-benzylcarboxyamide)-2'-deoxyuridine
  misc_feature (20)..(20): n is 5-(N-benzylcarboxyamide)-2'-deoxyuridine
  misc_feature (21)..(21): n is 2'-O-methyl-adenosine
  misc_feature (24)..(24): n is 2'-O-methyl-guanosine
nnncngnnacncgcgnnnanngcn

SEQ ID NO: 94 - DNA, 24 bp, Artificial Sequence
  Synthetic
  misc_feature (1)..(2): n is 5-(N-benzylcarboxyamide)-2'-deoxyuridine
  misc_feature (5)..(5): n is hexaethylene glycol
  misc_feature (7)..(8): n is 5-(N-benzylcarboxyamide)-2'-deoxyuridine
  misc_feature (16)..(16): n is 5-[N-(1-naphthylmethyl)carboxyamide]-2'-deoxyuridine
  misc_feature (17)..(18): n is 5-(N-benzylcarboxyamide)-2'-deoxyuridine
  misc_feature (20)..(20): n is 5-(N-benzylcarboxyamide)-2'-deoxyuridine
nnacngnnacacgcgnnnanagcg

SEQ ID NO: 95 - DNA, 24 bp, Artificial Sequence
  Synthetic
  misc_feature (1)..(2): n is 5-(N-benzylcarboxyamide)-2'-deoxyuridine
  misc_feature (5)..(5): n is hexaethylene glycol
  misc_feature (7)..(7): n is 2'-O-methyl-uridine
  misc_feature (8)..(8): n is 5-(N-benzylcarboxyamide)-2'-deoxyuridine
  misc_feature (16)..(18): n is 5-(N-benzylcarboxyamide)-2'-deoxyuridine
  misc_feature (20)..(20): n is 5-(N-benzylcarboxyamide)-2'-deoxyuridine
nnacngnnacacgcgnnnanagcg

SEQ ID NO: 96 - DNA, 24 bp, Artificial Sequence
  Synthetic
  misc_feature (1)..(2): n is 5-(N-benzylcarboxyamide)-2'-deoxyuridine
  misc_feature (3)..(3): n is 2'-O-methyl-adenosine
  misc_feature (5)..(5): n is hexaethylene glycol
  misc_feature (7)..(7): n is 2'-O-methyl-uridine
  misc_feature (8)..(8): n is 5-(N-benzylcarboxyamide)-2'-deoxyuridine
  misc_feature (11)..(11): n is 2'-O-methyl-adenosine
  misc_feature (16)..(16): n is 5-[N-(1-naphthylmethyl)carboxyamide]-2'-deoxyuridine
  misc_feature (17)..(18): n is 5-(N-benzylcarboxyamide)-2'-deoxyuridine
  misc_feature (20)..(20): n is 5-(N-benzylcarboxyamide)-2'-deoxyuridine
  misc_feature (21)..(21): n is 2'-O-methyl-adenosine
  misc_feature (24)..(24): n is 2'-O-methyl-guanosine
nnncngnnacncgcgnnnanngcn

SEQ ID NO: 97 - DNA, 24 bp, Artificial Sequence
  Synthetic
  misc_feature (1)..(1): n is 5-[N-(phenyl-2-ethyl)-carboxyamide]-2'-deoxyuridine
  misc_feature (2)..(2): n is 5-(N-benzylcarboxyamide)-2'-deoxyuridine
  misc_feature (3)..(3): n is 2'-O-methyl-adenosine
  misc_feature (5)..(5): n is hexaethylene glycol
  misc_feature (7)..(8): n is 5-(N-benzylcarboxyamide)-2'-deoxyuridine
  misc_feature (11)..(11): n is 2'-O-methyl-adenosine
  misc_feature (16)..(18): n is 5-(N-benzylcarboxyamide)-2'-deoxyuridine
  misc_feature (20)..(20): n is 5-(N-benzylcarboxyamide)-2'-deoxyuridine
  misc_feature (21)..(21): n is 2'-O-methyl-adenosine
  misc_feature (24)..(24): n is 2'-O-methyl-guanosine
nnncngnnacncgcgnnnanngcn

SEQ ID NO: 98 - DNA, 24 bp, Artificial Sequence
  Synthetic
  misc_feature (1)..(1): n is 5-(N-benzylcarboxyamide)-2'-deoxyuridine
  misc_feature (2)..(2): n is 5-[N-(phenyl-2-ethyl)-carboxyamide]-2'-deoxyuridine
  misc_feature (3)..(3): n is 2'-O-methyl-adenosine
  misc_feature (5)..(5): n is hexaethylene glycol
  misc_feature (7)..(8): n is 5-(N-benzylcarboxyamide)-2'-deoxyuridine
  misc_feature (11)..(11): n is 2'-O-methyl-adenosine
  misc_feature (16)..(18): n is 5-(N-benzylcarboxyamide)-2'-deoxyuridine
  misc_feature (20)..(20): n is 5-(N-benzylcarboxyamide)-2'-deoxyuridine
  misc_feature (21)..(21): n is 2'-O-methyl-adenosine
  misc_feature (24)..(24): n is 2'-O-methyl-guanosine
nnncngnnacncgcgnnnanngcn

SEQ ID NO: 99 - DNA, 24 bp, Artificial Sequence
  Synthetic
  misc_feature (1)..(2): n is 5-(N-benzylcarboxyamide)-2'-deoxyuridine
  misc_feature (3)..(3): n is 2'-O-methyl-adenosine
  misc_feature (5)..(5): n is hexaethylene glycol
  misc_feature (7)..(7): n is 5-[N-(phenyl-2-ethyl)-carboxyamide]-2'-deoxyuridine
  misc_feature (8)..(8): n is 5-(N-benzylcarboxyamide)-2'-deoxyuridine
  misc_feature (11)..(11): n is 2'-O-methyl-adenosine
  misc_feature (16)..(18): n is 5-(N-benzylcarboxyamide)-2'-deoxyuridine
  misc_feature (20)..(20): n is 5-(N-benzylcarboxyamide)-2'-deoxyuridine
  misc_feature (21)..(21): n is 2'-O-methyl-adenosine
  misc_feature (24)..(24): n is 2'-O-methyl-guanosine
nnncngnnacncgcgnnnanngcn

SEQ ID NO: 100 - DNA, 24 bp, Artificial Sequence
  Synthetic
  misc_feature (1)..(2): n is 5-(N-benzylcarboxyamide)-2'-deoxyuridine
  misc_feature (3)..(3): n is 2'-O-methyl-adenosine
  misc_feature (5)..(5): n is hexaethylene glycol
  misc_feature (7)..(7): n is 5-(N-benzylcarboxyamide)-2'-deoxyuridine
  misc_feature (8)..(8): n is 5-[N-(phenyl-2-ethyl)-carboxyamide]-2'-deoxyuridine
  misc_feature (11)..(11): n is 2'-O-methyl-adenosine
  misc_feature (16)..(18): n is 5-(N-benzylcarboxyamide)-2'-deoxyuridine
  misc_feature (20)..(20): n is 5-(N-benzylcarboxyamide)-2'-deoxyuridine
  misc_feature (21)..(21): n is 2'-O-methyl-adenosine
  misc_feature (24)..(24): n is 2'-O-methyl-guanosine
nnncngnnacncgcgnnnanngcn

SEQ ID NO: 101 - DNA, 24 bp, Artificial Sequence
  Synthetic
  misc_feature (1)..(2): n is 5-(N-benzylcarboxyamide)-2'-deoxyuridine
  misc_feature (3)..(3): n is 2'-O-methyl-adenosine
  misc_feature (5)..(5): n is hexaethylene glycol
  misc_feature (7)..(8): n is 5-(N-benzylcarboxyamide)-2'-deoxyuridine
  misc_feature (11)..(11): n is 2'-O-methyl-adenosine
  misc_feature (16)..(16): n is 5-[N-(phenyl-2-ethyl)-carboxyamide]-2'-deoxyuridine
  misc_feature (17)..(18): n is 5-(N-benzylcarboxyamide)-2'-deoxyuridine
  misc_feature (20)..(20): n is 5-(N-benzylcarboxyamide)-2'-deoxyuridine
  misc_feature (21)..(21): n is 2'-O-methyl-adenosine
  misc_feature (24)..(24): n is 2'-O-methyl-guanosine
nnncngnnacncgcgnnnanngcn

SEQ ID NO: 102 - DNA, 24 bp, Artificial Sequence
  Synthetic
  misc_feature (1)..(2): n is 5-(N-benzylcarboxyamide)-2'-deoxyuridine
  misc_feature (3)..(3): n is 2'-O-methyl-adenosine
  misc_feature (5)..(5): n is hexaethylene glycol
  misc_feature (7)..(8): n is 5-(N-benzylcarboxyamide)-2'-deoxyuridine
  misc_feature (11)..(11): n is 2'-O-methyl-adenosine
  misc_feature (16)..(16): n is 5-(N-benzylcarboxyamide)-2'-deoxyuridine
  misc_feature (17)..(17): n is 5-[N-(phenyl-2-ethyl)-carboxyamide]-2'-deoxyuridine
  misc_feature (18)..(18): n is 5-(N-benzylcarboxyamide)-2'-deoxyuridine
  misc_feature (20)..(20): n is 5-(N-benzylcarboxyamide)-2'-deoxyuridine
  misc_feature (21)..(21): n is 2'-O-methyl-adenosine
  misc_feature (24)..(24): n is 2'-O-methyl-guanosine
nnncngnnacncgcgnnnanngcn

SEQ ID NO: 103 - DNA, 24 bp, Artificial Sequence
  Synthetic
  misc_feature (1)..(2): n is 5-(N-benzylcarboxyamide)-2'-deoxyuridine
  misc_feature (3)..(3): n is 2'-O-methyl-adenosine
  misc_feature (5)..(5): n is hexaethylene glycol
  misc_feature (7)..(8): n is 5-(N-benzylcarboxyamide)-2'-deoxyuridine
  misc_feature (11)..(11): n is 2'-O-methyl-adenosine
  misc_feature (16)..(17): n is 5-(N-benzylcarboxyamide)-2'-deoxyuridine
  misc_feature (18)..(18): n is 5-[N-(phenyl-2-ethyl)-carboxyamide]-2'-deoxyuridine
  misc_feature (20)..(20): n is 5-(N-benzylcarboxyamide)-2'-deoxyuridine
  misc_feature (21)..(21): n is 2'-O-methyl-adenosine
  misc_feature (24)..(24): n is 2'-O-methyl-guanosine
nnncngnnacncgcgnnnanngcn

SEQ ID NO: 104 - DNA, 24 bp, Artificial Sequence
  Synthetic
  misc_feature (1)..(2): n is 5-(N-benzylcarboxyamide)-2'-deoxyuridine
  misc_feature (3)..(3): n is 2'-O-methyl-adenosine
  misc_feature (5)..(5): n is hexaethylene glycol
  misc_feature (7)..(8): n is 5-(N-benzylcarboxyamide)-2'-deoxyuridine
  misc_feature (11)..(11): n is 2'-O-methyl-adenosine
  misc_feature (16)..(18): n is 5-(N-benzylcarboxyamide)-2'-deoxyuridine
  misc_feature (20)..(20): n is 5-[N-(phenyl-2-ethyl)-carboxyamide]-2'-deoxyuridine
  misc_feature (21)..(21): n is 2'-O-methyl-adenosine
  misc_feature (24)..(24): n is 2'-O-methyl-guanosine
nnncngnnacncgcgnnnanngcn

SEQ ID NO: 105 - DNA, 24 bp, Artificial Sequence
  Synthetic
  misc_feature (1)..(1): n is 5-[N-(3-benzo[b]thiophene-2-ethyl)carboxyamide]-2'-deoxyuridine
  misc_feature (2)..(2): n is 5-(N-benzylcarboxyamide)-2'-deoxyuridine
  misc_feature (3)..(3): n is 2'-O-methyl-adenosine
  misc_feature (5)..(5): n is hexaethylene glycol
  misc_feature (7)..(8): n is 5-(N-benzylcarboxyamide)-2'-deoxyuridine
  misc_feature (11)..(11): n is 2'-O-methyl-adenosine
  misc_feature (16)..(18): n is 5-(N-benzylcarboxyamide)-2'-deoxyuridine
  misc_feature (20)..(20): n is 5-(N-benzylcarboxyamide)-2'-deoxyuridine
  misc_feature (21)..(21): n is 2'-O-methyl-adenosine
  misc_feature (24)..(24): n is 2'-O-methyl-guanosine
nnncngnnacncgcgnnnanngcn

SEQ ID NO: 106 - DNA, 24 bp, Artificial Sequence
  Synthetic
  misc_feature (1)..(1): n is 5-(N-benzylcarboxyamide)-2'-deoxyuridine
  misc_feature (2)..(2): n is 5-[N-(3-benzo[b]thiophene-2-ethyl)carboxyamide]-2'-deoxyuridine
  misc_feature (3)..(3): n is 2'-O-methyl-adenosine
  misc_feature (5)..(5): n is hexaethylene glycol
  misc_feature (7)..(8): n is 5-(N-benzylcarboxyamide)-2'-deoxyuridine
  misc_feature (11)..(11): n is 2'-O-methyl-adenosine
  misc_feature (16)..(18): n is 5-(N-benzylcarboxyamide)-2'-deoxyuridine
  misc_feature (20)..(20): n is 5-(N-benzylcarboxyamide)-2'-deoxyuridine
  misc_feature (21)..(21): n is 2'-O-methyl-adenosine
  misc_feature (24)..(24): n is 2'-O-methyl-guanosine
nnncngnnacncgcgnnnanngcn

SEQ ID NO: 107 - DNA, 24 bp, Artificial Sequence
  Synthetic
  misc_feature (1)..(2): n is 5-(N-benzylcarboxyamide)-2'-deoxyuridine
  misc_feature (3)..(3): n is 2'-O-methyl-adenosine
  misc_feature (5)..(5): n is hexaethylene glycol
  misc_feature (7)..(7): n is 5-[N-(3-benzo[b]thiophene-2-ethyl)carboxyamide]-2'-deoxyuridine
  misc_feature (8)..(8): n is 5-(N-benzylcarboxyamide)-2'-deoxyuridine
  misc_feature (11)..(11): n is 2'-O-methyl-adenosine
  misc_feature (16)..(18): n is 5-(N-benzylcarboxyamide)-2'-deoxyuridine
  misc_feature (20)..(20): n is 5-(N-benzylcarboxyamide)-2'-deoxyuridine
  misc_feature (21)..(21): n is 2'-O-methyl-adenosine
  misc_feature (24)..(24): n is 2'-O-methyl-guanosine
nnncngnnacncgcgnnnanngcn

SEQ ID NO: 108 - DNA, 24 bp, Artificial Sequence
  Synthetic
  misc_feature (1)..(2): n is 5-(N-benzylcarboxyamide)-2'-deoxyuridine
  misc_feature (3)..(3): n is 2'-O-methyl-adenosine
  misc_feature (5)..(5): n is hexaethylene glycol
  misc_feature (7)..(7): n is 5-(N-benzylcarboxyamide)-2'-deoxyuridine
  misc_feature (8)..(8): n is 5-[N-(3-benzo[b]thiophene-2-ethyl)carboxyamide]-2'-deoxyuridine
  misc_feature (11)..(11): n is 2'-O-methyl-adenosine
  misc_feature (16)..(18): n is 5-(N-benzylcarboxyamide)-2'-deoxyuridine
  misc_feature (20)..(20): n is 5-(N-benzylcarboxyamide)-2'-deoxyuridine
  misc_feature (21)..(21): n is 2'-O-methyl-adenosine
  misc_feature (24)..(24): n is 2'-O-methyl-guanosine
nnncngnnacncgcgnnnanngcn

SEQ ID NO: 109 - DNA, 24 bp, Artificial Sequence
  Synthetic
  misc_feature (1)..(2): n is 5-(N-benzylcarboxyamide)-2'-deoxyuridine
  misc_feature (3)..(3): n is 2'-O-methyl-adenosine
  misc_feature (5)..(5): n is hexaethylene glycol
  misc_feature (7)..(8): n is 5-(N-benzylcarboxyamide)-2'-deoxyuridine
  misc_feature (11)..(11): n is 2'-O-methyl-adenosine
  misc_feature (16)..(16): n is 5-[N-(3-benzo[b]thiophene-2-ethyl)carboxyamide]-2'-deoxyuridine
  misc_feature (17)..(18): n is 5-(N-benzylcarboxyamide)-2'-deoxyuridine
  misc_feature (20)..(20): n is 5-(N-benzylcarboxyamide)-2'-deoxyuridine
  misc_feature (21)..(21): n is 2'-O-methyl-adenosine
  misc_feature (24)..(24): n is 2'-O-methyl-guanosine
nnncngnnacncgcgnnnanngcn

SEQ ID NO: 110 - DNA, 24 bp, Artificial Sequence
  Synthetic
  misc_feature (1)..(2): n is 5-(N-benzylcarboxyamide)-2'-deoxyuridine
  misc_feature (3)..(3): n is 2'-O-methyl-adenosine
  misc_feature (5)..(5): n is hexaethylene glycol
  misc_feature (7)..(8): n is 5-(N-benzylcarboxyamide)-2'-deoxyuridine
  misc_feature (11)..(11): n is 2'-O-methyl-adenosine
  misc_feature (16)..(16): n is 5-(N-benzylcarboxyamide)-2'-deoxyuridine
  misc_feature (17)..(17): n is 5-[N-(3-benzo[b]thiophene-2-ethyl)carboxyamide]-2'-deoxyuridine
  misc_feature (18)..(18): n is 5-(N-benzylcarboxyamide)-2'-deoxyuridine
  misc_feature (20)..(20): n is 5-(N-benzylcarboxyamide)-2'-deoxyuridine
  misc_feature (21)..(21): n is 2'-O-methyl-adenosine
  misc_feature (24)..(24): n is 2'-O-methyl-guanosine
nnncngnnacncgcgnnnanngcn

SEQ ID NO: 111 - DNA, 24 bp, Artificial Sequence
  Synthetic
  misc_feature (1)..(2): n is 5-(N-benzylcarboxyamide)-2'-deoxyuridine
  misc_feature (3)..(3): n is 2'-O-methyl-adenosine
  misc_feature (5)..(5): n is hexaethylene glycol
  misc_feature (7)..(8): n is 5-(N-benzylcarboxyamide)-2'-deoxyuridine
  misc_feature (11)..(11): n is 2'-O-methyl-adenosine
  misc_feature (16)..(17): n is 5-(N-benzylcarboxyamide)-2'-deoxyuridine
  misc_feature (18)..(18): n is 5-[N-(3-benzo[b]thiophene-2-ethyl)carboxyamide]-2'-deoxyuridine
  misc_feature (20)..(20): n is 5-(N-benzylcarboxyamide)-2'-deoxyuridine
  misc_feature (21)..(21): n is 2'-O-methyl-adenosine
  misc_feature (24)..(24): n is 2'-O-methyl-guanosine
nnncngnnacncgcgnnnanngcn

SEQ ID NO: 112 - DNA, 24 bp, Artificial Sequence
  Synthetic
  misc_feature (1)..(2): n is 5-(N-benzylcarboxyamide)-2'-deoxyuridine
  misc_feature (3)..(3): n is 2'-O-methyl-adenosine
  misc_feature (5)..(5): n is hexaethylene glycol
  misc_feature (7)..(8): n is 5-(N-benzylcarboxyamide)-2'-deoxyuridine
  misc_feature (11)..(11): n is 2'-O-methyl-adenosine
  misc_feature (16)..(18): n is 5-(N-benzylcarboxyamide)-2'-deoxyuridine
  misc_feature (20)..(20): n is 5-[N-(3-benzo[b]thiophene-2-ethyl)carboxyamide]-2'-deoxyuridine
  misc_feature (21)..(21): n is 2'-O-methyl-adenosine
  misc_feature (24)..(24): n is 2'-O-methyl-guanosine
nnncngnnacncgcgnnnanngcn

SEQ ID NO: 113 - DNA, 24 bp, Artificial Sequence
  Synthetic
  misc_feature (1)..(1): n is 5-[N-(2-thiophene-methyl)carboxyamide]-2'-deoxyuridine
  misc_feature (2)..(2): n is 5-(N-benzylcarboxyamide)-2'-deoxyuridine
  misc_feature (3)..(3): n is 2'-O-methyl-adenosine
  misc_feature (5)..(5): n is hexaethylene glycol
  misc_feature (7)..(8): n is 5-(N-benzylcarboxyamide)-2'-deoxyuridine
  misc_feature (11)..(11): n is 2'-O-methyl-adenosine
  misc_feature (16)..(18): n is 5-(N-benzylcarboxyamide)-2'-deoxyuridine
  misc_feature (20)..(20): n is 5-(N-benzylcarboxyamide)-2'-deoxyuridine
  misc_feature (21)..(21): n is 2'-O-methyl-adenosine
  misc_feature (24)..(24): n is 2'-O-methyl-guanosine
nnncngnnacncgcgnnnanngcn

SEQ ID NO: 114 - DNA, 24 bp, Artificial Sequence
  Synthetic
  misc_feature (1)..(1): n is 5-(N-benzylcarboxyamide)-2'-deoxyuridine
  misc_feature (2)..(2): n is 5-[N-(2-thiophene-methyl)carboxyamide]-2'-deoxyuridine
  misc_feature (3)..(3): n is 2'-O-methyl-adenosine
  misc_feature (5)..(5): n is hexaethylene glycol
  misc_feature (7)..(8): n is 5-(N-benzylcarboxyamide)-2'-deoxyuridine
  misc_feature (11)..(11): n is 2'-O-methyl-adenosine
  misc_feature (16)..(18): n is 5-(N-benzylcarboxyamide)-2'-deoxyuridine
  misc_feature (20)..(20): n is 5-(N-benzylcarboxyamide)-2'-deoxyuridine
  misc_feature (21)..(21): n is 2'-O-methyl-adenosine
  misc_feature (24)..(24): n is 2'-O-methyl-guanosine
nnncngnnacncgcgnnnanngcn

SEQ ID NO: 115 - DNA, 24 bp, Artificial Sequence
  Synthetic
  misc_feature (1)..(2): n is 5-(N-benzylcarboxyamide)-2'-deoxyuridine
  misc_feature (3)..(3): n is 2'-O-methyl-adenosine
  misc_feature (5)..(5): n is hexaethylene glycol
  misc_feature (7)..(7): n is 5-[N-(2-thiophene-methyl)carboxyamide]-2'-deoxyuridine
  misc_feature (8)..(8): n is 5-(N-benzylcarboxyamide)-2'-deoxyuridine
  misc_feature (11)..(11): n is 2'-O-methyl-adenosine
  misc_feature (16)..(18): n is 5-(N-benzylcarboxyamide)-2'-deoxyuridine
  misc_feature (20)..(20): n is 5-(N-benzylcarboxyamide)-2'-deoxyuridine
  misc_feature (21)..(21): n is 2'-O-methyl-adenosine
  misc_feature (24)..(24): n is 2'-O-methyl-guanosine
nnncngnnacncgcgnnnanngcn

SEQ ID NO: 116 - DNA, 24 bp, Artificial Sequence
  Synthetic
  misc_feature (1)..(2): n is 5-(N-benzylcarboxyamide)-2'-deoxyuridine
  misc_feature (3)..(3): n is 2'-O-methyl-adenosine
  misc_feature (5)..(5): n is hexaethylene glycol
  misc_feature (7)..(7): n is 5-(N-benzylcarboxyamide)-2'-deoxyuridine
  misc_feature (8)..(8): n is 5-[N-(2-thiophene-methyl)carboxyamide]-2'-deoxyuridine
  misc_feature (11)..(11): n is 2'-O-methyl-adenosine
  misc_feature (16)..(18): n is 5-(N-benzylcarboxyamide)-2'-deoxyuridine
  misc_feature (20)..(20): n is 5-(N-benzylcarboxyamide)-2'-deoxyuridine
  misc_feature (21)..(21): n is 2'-O-methyl-adenosine
  misc_feature (24)..(24): n is 2'-O-methyl-guanosine
nnncngnnacncgcgnnnanngcn

SEQ ID NO: 117 - DNA, 24 bp, Artificial Sequence
  Synthetic
  misc_feature (1)..(2): n is 5-(N-benzylcarboxyamide)-2'-deoxyuridine
  misc_feature (3)..(3): n is 2'-O-methyl-adenosine
  misc_feature (5)..(5): n is hexaethylene glycol
  misc_feature (7)..(8): n is 5-(N-benzylcarboxyamide)-2'-deoxyuridine
  misc_feature (11)..(11): n is 2'-O-methyl-adenosine
  misc_feature (16)..(16): n is 5-[N-(2-thiophene-methyl)carboxyamide]-2'-deoxyuridine
  misc_feature (17)..(18): n is 5-(N-benzylcarboxyamide)-2'-deoxyuridine
  misc_feature (20)..(20): n is 5-(N-benzylcarboxyamide)-2'-deoxyuridine
  misc_feature (21)..(21): n is 2'-O-methyl-adenosine
  misc_feature (24)..(24): n is 2'-O-methyl-guanosine
nnncngnnacncgcgnnnanngcn

SEQ ID NO: 118 - DNA, 24 bp, Artificial Sequence
  Synthetic
  misc_feature (1)..(2): n is 5-(N-benzylcarboxyamide)-2'-deoxyuridine
  misc_feature (3)..(3): n is 2'-O-methyl-adenosine
  misc_feature (5)..(5): n is hexaethylene glycol
  misc_feature (7)..(8): n is 5-(N-benzylcarboxyamide)-2'-deoxyuridine
  misc_feature (11)..(11): n is 2'-O-methyl-adenosine
  misc_feature (16)..(16): n is 5-(N-benzylcarboxyamide)-2'-deoxyuridine
  misc_feature (17)..(17): n is 5-[N-(2-thiophene-methyl)carboxyamide]-2'-deoxyuridine
  misc_feature (18)..(18): n is 5-(N-benzylcarboxyamide)-2'-deoxyuridine
  misc_feature (20)..(20): n is 5-(N-benzylcarboxyamide)-2'-deoxyuridine
  misc_feature (21)..(21): n is 2'-O-methyl-adenosine
  misc_feature (24)..(24): n is 2'-O-methyl-guanosine
nnncngnnacncgcgnnnanngcn

SEQ ID NO: 119 - DNA, 24 bp, Artificial Sequence
  Synthetic
  misc_feature (1)..(2): n is 5-(N-benzylcarboxyamide)-2'-deoxyuridine
  misc_feature (3)..(3): n is 2'-O-methyl-adenosine
  misc_feature (5)..(5): n is hexaethylene glycol
  misc_feature (7)..(8): n is 5-(N-benzylcarboxyamide)-2'-deoxyuridine
  misc_feature (11)..(11): n is 2'-O-methyl-adenosine
  misc_feature (16)..(17): n is 5-(N-benzylcarboxyamide)-2'-deoxyuridine
  misc_feature (18)..(18): n is 5-[N-(2-thiophene-methyl)carboxyamide]-2'-deoxyuridine
  misc_feature (20)..(20): n is 5-(N-benzylcarboxyamide)-2'-deoxyuridine
  misc_feature (21)..(21): n is 2'-O-methyl-adenosine
  misc_feature (24)..(24): n is 2'-O-methyl-guanosine
nnncngnnacncgcgnnnanngcn

SEQ ID NO: 120 - DNA, 24 bp, Artificial Sequence
  Synthetic
  misc_feature (1)..(2): n is 5-(N-benzylcarboxyamide)-2'-deoxyuridine
  misc_feature (3)..(3): n is 2'-O-methyl-adenosine
  misc_feature (5)..(5): n is hexaethylene glycol
  misc_feature (7)..(8): n is 5-(N-benzylcarboxyamide)-2'-deoxyuridine
  misc_feature (11)..(11): n is 2'-O-methyl-adenosine
  misc_feature (16)..(18): n is 5-(N-benzylcarboxyamide)-2'-deoxyuridine
  misc_feature (20)..(20): n is 5-[N-(2-thiophene-methyl)carboxyamide]-2'-deoxyuridine
  misc_feature (21)..(21): n is 2'-O-methyl-adenosine
  misc_feature (24)..(24): n is 2'-O-methyl-guanosine
nnncngnnacncgcgnnnanngcn

SEQ ID NO: 121 - DNA, 24 bp, Artificial Sequence
  Synthetic
  misc_feature (1)..(1): n is 5-[N-(1-naphthylmethyl)carboxyamide]-2'-deoxyuridine
  misc_feature (2)..(2): n is 5-(N-benzylcarboxyamide)-2'-deoxyuridine
  misc_feature (3)..(3): n is 2'-O-methyl-adenosine
  misc_feature (5)..(5): n is hexaethylene glycol
  misc_feature (7)..(8): n is 5-(N-benzylcarboxyamide)-2'-deoxyuridine
  misc_feature (11)..(11): n is 2'-O-methyl-adenosine
  misc_feature (16)..(18): n is 5-(N-benzylcarboxyamide)-2'-deoxyuridine
  misc_feature (20)..(20): n is 5-(N-benzylcarboxyamide)-2'-deoxyuridine
  misc_feature (21)..(21): n is 2'-O-methyl-adenosine
  misc_feature (24)..(24): n is 2'-O-methyl-guanosine
nnncngnnacncgcgnnnanngcn

SEQ ID NO: 122 - DNA, 24 bp, Artificial Sequence
  Synthetic
  misc_feature (1)..(1): n is 5-(N-benzylcarboxyamide)-2'-deoxyuridine
  misc_feature (2)..(2): n is 5-[N-(1-naphthylmethyl)carboxyamide]-2'-deoxyuridine
  misc_feature (3)..(3): n is 2'-O-methyl-adenosine
  misc_feature (5)..(5): n is hexaethylene glycol
  misc_feature (7)..(8): n is 5-(N-benzylcarboxyamide)-2'-deoxyuridine
  misc_feature (11)..(11): n is 2'-O-methyl-adenosine
  misc_feature (16)..(18): n is 5-(N-benzylcarboxyamide)-2'-deoxyuridine
  misc_feature (20)..(20): n is 5-(N-benzylcarboxyamide)-2'-deoxyuridine
  misc_feature (21)..(21): n is 2'-O-methyl-adenosine
  misc_feature (24)..(24): n is 2'-O-methyl-guanosine
nnncngnnacncgcgnnnanngcn

SEQ ID NO: 123 - DNA, 24 bp, Artificial Sequence
  Synthetic
  misc_feature (1)..(2): n is 5-(N-benzylcarboxyamide)-2'-deoxyuridine
  misc_feature (3)..(3): n is 2'-O-methyl-adenosine
  misc_feature (5)..(5): n is hexaethylene glycol
  misc_feature (7)..(7): n is 5-[N-(1-naphthylmethyl)carboxyamide]-2'-deoxyuridine
  misc_feature (8)..(8): n is 5-(N-benzylcarboxyamide)-2'-deoxyuridine
  misc_feature (11)..(11): n is 2'-O-methyl-adenosine
  misc_feature (16)..(18): n is 5-(N-benzylcarboxyamide)-2'-deoxyuridine
  misc_feature (20)..(20): n is 5-(N-benzylcarboxyamide)-2'-deoxyuridine
  misc_feature (21)..(21): n is 2'-O-methyl-adenosine
  misc_feature (24)..(24): n is 2'-O-methyl-guanosine
nnncngnnacncgcgnnnanngcn

SEQ ID NO: 124 - DNA, 24 bp, Artificial Sequence
  Synthetic
  misc_feature (1)..(2): n is 5-(N-benzylcarboxyamide)-2'-deoxyuridine
  misc_feature (3)..(3): n is 2'-O-methyl-adenosine
  misc_feature (5)..(5): n is hexaethylene glycol
  misc_feature (7)..(7): n is 5-(N-benzylcarboxyamide)-2'-deoxyuridine
  misc_feature (8)..(8): n is 5-[N-(1-naphthylmethyl)carboxyamide]-2'-deoxyuridine
  misc_feature (11)..(11): n is 2'-O-methyl-adenosine
  misc_feature (16)..(18): n is 5-(N-benzylcarboxyamide)-2'-deoxyuridine
  misc_feature (20)..(20): n is 5-(N-benzylcarboxyamide)-2'-deoxyuridine
  misc_feature (21)..(21): n is 2'-O-methyl-adenosine
  misc_feature (24)..(24): n is 2'-O-methyl-guanosine
nnncngnnacncgcgnnnanngcn

SEQ ID NO: 125 - DNA, 24 bp, Artificial Sequence
  Synthetic
  misc_feature (1)..(2): n is 5-(N-benzylcarboxyamide)-2'-deoxyuridine
  misc_feature (3)..(3): n is 2'-O-methyl-adenosine
  misc_feature (5)..(5): n is hexaethylene glycol
  misc_feature (7)..(8): n is 5-(N-benzylcarboxyamide)-2'-deoxyuridine
  misc_feature (11)..(11): n is 2'-O-methyl-adenosine
  misc_feature (16)..(16): n is 5-[N-(1-naphthylmethyl)carboxyamide]-2'-deoxyuridine
  misc_feature (17)..(18): n is 5-(N-benzylcarboxyamide)-2'-deoxyuridine
  misc_feature (20)..(20): n is 5-(N-benzylcarboxyamide)-2'-deoxyuridine
  misc_feature (21)..(21): n is 2'-O-methyl-adenosine
  misc_feature (24)..(24): n is 2'-O-methyl-guanosine
nnncngnnacncgcgnnnanngcn

SEQ ID NO: 126 - DNA, 24 bp, Artificial Sequence
  Synthetic
  misc_feature (1)..(2): n is 5-(N-benzylcarboxyamide)-2'-deoxyuridine
  misc_feature (3)..(3): n is 2'-O-methyl-adenosine
  misc_feature (5)..(5): n is hexaethylene glycol
  misc_feature (7)..(8): n is 5-(N-benzylcarboxyamide)-2'-deoxyuridine
  misc_feature (11)..(11): n is 2'-O-methyl-adenosine
  misc_feature (16)..(16): n is 5-(N-benzylcarboxyamide)-2'-deoxyuridine
  misc_feature (17)..(17): n is 5-[N-(1-naphthylmethyl)carboxyamide]-2'-deoxyuridine
  misc_feature (18)..(18): n is 5-(N-benzylcarboxyamide)-2'-deoxyuridine
  misc_feature (20)..(20): n is 5-(N-benzylcarboxyamide)-2'-deoxyuridine
  misc_feature (21)..(21): n is 2'-O-methyl-adenosine
  misc_feature (24)..(24): n is 2'-O-methyl-guanosine
nnncngnnacncgcgnnnanngcn

SEQ ID NO: 127 - DNA, 24 bp, Artificial Sequence
  Synthetic
  misc_feature (1)..(2): n is 5-(N-benzylcarboxyamide)-2'-deoxyuridine
  misc_feature (3)..(3): n is 2'-O-methyl-adenosine
  misc_feature (5)..(5): n is hexaethylene glycol
  misc_feature (7)..(8): n is 5-(N-benzylcarboxyamide)-2'-deoxyuridine
  misc_feature (11)..(11): n is 2'-O-methyl-adenosine
  misc_feature (16)..(17): n is 5-(N-benzylcarboxyamide)-2'-deoxyuridine
  misc_feature (18)..(18): n is 5-[N-(1-naphthylmethyl)carboxyamide]-2'-deoxyuridine
  misc_feature (20)..(20): n is 5-(N-benzylcarboxyamide)-2'-deoxyuridine
  misc_feature (21)..(21): n is 2'-O-methyl-adenosine
  misc_feature (24)..(24): n is 2'-O-methyl-guanosine
nnncngnnacncgcgnnnanngcn

SEQ ID NO: 128 - DNA, 24 bp, Artificial Sequence
  Synthetic
  misc_feature (1)..(2): n is 5-(N-benzylcarboxyamide)-2'-deoxyuridine
  misc_feature (3)..(3): n is 2'-O-methyl-adenosine
  misc_feature (5)..(5): n is hexaethylene glycol
  misc_feature (7)..(8): n is 5-(N-benzylcarboxyamide)-2'-deoxyuridine
  misc_feature (11)..(11): n is 2'-O-methyl-adenosine
  misc_feature (16)..(18): n is 5-(N-benzylcarboxyamide)-2'-deoxyuridine
  misc_feature (20)..(20): n is 5-[N-(1-naphthylmethyl)carboxyamide]-2'-deoxyuridine
  misc_feature (21)..(21): n is 2'-O-methyl-adenosine
  misc_feature (24)..(24): n is 2'-O-methyl-guanosine
nnncngnnacncgcgnnnanngcn

SEQ ID NO: 129 - DNA, 24 bp, Artificial Sequence
  Synthetic
  misc_feature (1)..(1): n is 5-[N-isobutyl-carboxyamide]-2'-deoxyuridine
  misc_feature (2)..(2): n is 5-(N-benzylcarboxyamide)-2'-deoxyuridine
  misc_feature (3)..(3): n is 2'-O-methyl-adenosine
  misc_feature (5)..(5): n is hexaethylene glycol
  misc_feature (7)..(8): n is 5-(N-benzylcarboxyamide)-2'-deoxyuridine
  misc_feature (11)..(11): n is 2'-O-methyl-adenosine
  misc_feature (16)..(18): n is 5-(N-benzylcarboxyamide)-2'-deoxyuridine
  misc_feature (20)..(20): n is 5-(N-benzylcarboxyamide)-2'-deoxyuridine
  misc_feature (21)..(21): n is 2'-O-methyl-adenosine
  misc_feature (24)..(24): n is 2'-O-methyl-guanosine
nnncngnnacncgcgnnnanngcn

SEQ ID NO: 130 - DNA, 24 bp, Artificial Sequence
  Synthetic
  misc_feature (1)..(1): n is 5-(N-benzylcarboxyamide)-2'-deoxyuridine
  misc_feature (2)..(2): n is 5-[N-isobutyl-carboxyamide]-2'-deoxyuridine
  misc_feature (3)..(3): n is 2'-O-methyl-adenosine
  misc_feature (5)..(5): n is hexaethylene glycol
  misc_feature (7)..(8): n is 5-(N-benzylcarboxyamide)-2'-deoxyuridine
  misc_feature (11)..(11): n is 2'-O-methyl-adenosine
  misc_feature (16)..(18): n is 5-(N-benzylcarboxyamide)-2'-deoxyuridine
  misc_feature (20)..(20): n is 5-(N-benzylcarboxyamide)-2'-deoxyuridine
  misc_feature (21)..(21): n is 2'-O-methyl-adenosine
  misc_feature (24)..(24): n is 2'-O-methyl-guanosine
nnncngnnacncgcgnnnanngcn

SEQ ID NO: 131 - DNA, 24 bp, Artificial Sequence
  Synthetic
  misc_feature (1)..(2): n is 5-(N-benzylcarboxyamide)-2'-deoxyuridine
  misc_feature (3)..(3): n is 2'-O-methyl-adenosine
  misc_feature (5)..(5): n is hexaethylene glycol
  misc_feature (7)..(7): n is 5-[N-isobutyl-carboxyamide]-2'-deoxyuridine
  misc_feature (8)..(8): n is 5-(N-benzylcarboxyamide)-2'-deoxyuridine
  misc_feature (11)..(11): n is 2'-O-methyl-adenosine
  misc_feature (16)..(18): n is 5-(N-benzylcarboxyamide)-2'-deoxyuridine
  misc_feature (20)..(20): n is 5-(N-benzylcarboxyamide)-2'-deoxyuridine
  misc_feature (21)..(21): n is 2'-O-methyl-adenosine
  misc_feature (24)..(24): n is 2'-O-methyl-guanosine
nnncngnnacncgcgnnnanngcn

SEQ ID NO: 132 - DNA, 24 bp, Artificial Sequence
  Synthetic
  misc_feature (1)..(2): n is 5-(N-benzylcarboxyamide)-2'-deoxyuridine
  misc_feature (3)..(3): n is 2'-O-methyl-adenosine
  misc_feature (5)..(5): n is hexaethylene glycol
  misc_feature (7)..(7): n is 5-(N-benzylcarboxyamide)-2'-deoxyuridine
  misc_feature (8)..(8): n is 5-[N-isobutyl-carboxyamide]-2'-deoxyuridine
  misc_feature (11)..(11): n is 2'-O-methyl-adenosine
  misc_feature (16)..(18): n is 5-(N-benzylcarboxyamide)-2'-deoxyuridine
  misc_feature (20)..(20): n is 5-(N-benzylcarboxyamide)-2'-deoxyuridine
  misc_feature (21)..(21): n is 2'-O-methyl-adenosine
  misc_feature (24)..(24): n is 2'-O-methyl-guanosine
nnncngnnacncgcgnnnanngcn

SEQ ID NO: 133 - DNA, 24 bp, Artificial Sequence
  Synthetic
  misc_feature (1)..(2): n is 5-(N-benzylcarboxyamide)-2'-deoxyuridine
  misc_feature (3)..(3): n is 2'-O-methyl-adenosine
  misc_feature (5)..(5): n is hexaethylene glycol
  misc_feature (7)..(8): n is 5-(N-benzylcarboxyamide)-2'-deoxyuridine
  misc_feature (11)..(11): n is 2'-O-methyl-adenosine
  misc_feature (16)..(16): n is 5-[N-isobutyl-carboxyamide]-2'-deoxyuridine
  misc_feature (17)..(18): n is 5-(N-benzylcarboxyamide)-2'-deoxyuridine
  misc_feature (20)..(20): n is 5-(N-benzylcarboxyamide)-2'-deoxyuridine
  misc_feature (21)..(21): n is 2'-O-methyl-adenosine
  misc_feature (24)..(24): n is 2'-O-methyl-guanosine
nnncngnnacncgcgnnnanngcn

SEQ ID NO: 134 - DNA, 24 bp, Artificial Sequence
  Synthetic
  misc_feature (1)..(2): n is 5-(N-benzylcarboxyamide)-2'-deoxyuridine
  misc_feature (3)..(3): n is 2'-O-methyl-adenosine
  misc_feature (5)..(5): n is hexaethylene glycol
  misc_feature (7)..(8): n is 5-(N-benzylcarboxyamide)-2'-deoxyuridine
  misc_feature (11)..(11): n is 2'-O-methyl-adenosine
  misc_feature (16)..(16): n is 5-(N-benzylcarboxyamide)-2'-deoxyuridine
  misc_feature (17)..(17): n is 5-[N-isobutyl-carboxyamide]-2'-deoxyuridine
  misc_feature (18)..(18): n is 5-(N-benzylcarboxyamide)-2'-deoxyuridine
  misc_feature (20)..(20): n is 5-(N-benzylcarboxyamide)-2'-deoxyuridine
  misc_feature (21)..(21): n is 2'-O-methyl-adenosine
  misc_feature (24)..(24): n is 2'-O-methyl-guanosine
nnncngnnacncgcgnnnanngcn

SEQ ID NO: 135 - DNA, 24 bp, Artificial Sequence
  Synthetic
  misc_feature (1)..(2): n is 5-(N-benzylcarboxyamide)-2'-deoxyuridine
  misc_feature (3)..(3): n is 2'-O-methyl-adenosine
  misc_feature (5)..(5): n is hexaethylene glycol
  misc_feature (7)..(8): n is 5-(N-benzylcarboxyamide)-2'-deoxyuridine
  misc_feature (11)..(11): n is 2'-O-methyl-adenosine
  misc_feature (16)..(17): n is 5-(N-benzylcarboxyamide)-2'-deoxyuridine
  misc_feature (18)..(18): n is 5-[N-isobutyl-carboxyamide]-2'-deoxyuridine
  misc_feature (20)..(20): n is 5-(N-benzylcarboxyamide)-2'-deoxyuridine
  misc_feature (21)..(21): n is 2'-O-methyl-adenosine
  misc_feature (24)..(24): n is 2'-O-methyl-guanosine
nnncngnnacncgcgnnnanngcn

SEQ ID NO: 136 - DNA, 24 bp, Artificial Sequence
  Synthetic
  misc_feature (1)..(2): n is 5-(N-benzylcarboxyamide)-2'-deoxyuridine
  misc_feature (3)..(3): n is 2'-O-methyl-adenosine
  misc_feature (5)..(5): n is hexaethylene glycol
  misc_feature (7)..(8): n is 5-(N-benzylcarboxyamide)-2'-deoxyuridine
  misc_feature (11)..(11): n is 2'-O-methyl-adenosine
  misc_feature (16)..(18): n is 5-(N-benzylcarboxyamide)-2'-deoxyuridine
  misc_feature (20)..(20): n is 5-[N-isobutyl-carboxyamide]-2'-deoxyuridine
  misc_feature (21)..(21): n is 2'-O-methyl-adenosine
  misc_feature (24)..(24): n is 2'-O-methyl-guanosine
nnncngnnacncgcgnnnanngcn

SEQ ID NO: 137 - DNA, 24 bp, Artificial Sequence
  Synthetic
  misc_feature (1)..(1): n is 5-[N-(3-indole-2-ethyl)-carboxyamide]-2'-deoxyuridine
  misc_feature (2)..(2): n is 5-(N-benzylcarboxyamide)-2'-deoxyuridine
  misc_feature (3)..(3): n is 2'-O-methyl-adenosine
  misc_feature (5)..(5): n is hexaethylene glycol
  misc_feature (7)..(8): n is 5-(N-benzylcarboxyamide)-2'-deoxyuridine
  misc_feature (11)..(11): n is 2'-O-methyl-adenosine
  misc_feature (16)..(18): n is 5-(N-benzylcarboxyamide)-2'-deoxyuridine
  misc_feature (20)..(20): n is 5-(N-benzylcarboxyamide)-2'-deoxyuridine
  misc_feature (21)..(21): n is 2'-O-methyl-adenosine
  misc_feature (24)..(24): n is 2'-O-methyl-guanosine
nnncngnnacncgcgnnnanngcn

SEQ ID NO: 138 - DNA, 24 bp, Artificial Sequence
  Synthetic
  misc_feature (1)..(1): n is 5-(N-benzylcarboxyamide)-2'-deoxyuridine
  misc_feature (2)..(2): n is 5-[N-(3-indole-2-ethyl)-carboxyamide]-2'-deoxyuridine
  misc_feature (3)..(3): n is 2'-O-methyl-adenosine
  misc_feature (5)..(5): n is hexaethylene glycol
  misc_feature (7)..(8): n is 5-(N-benzylcarboxyamide)-2'-deoxyuridine
  misc_feature (11)..(11): n is 2'-O-methyl-adenosine
  misc_feature (16)..(18): n is 5-(N-benzylcarboxyamide)-2'-deoxyuridine
  misc_feature (20)..(20): n is 5-(N-benzylcarboxyamide)-2'-deoxyuridine
  misc_feature (21)..(21): n is 2'-O-methyl-adenosine
  misc_feature (24)..(24): n is 2'-O-methyl-guanosine
nnncngnnacncgcgnnnanngcn

SEQ ID NO: 139 - DNA, 24 bp, Artificial Sequence
  Synthetic
  misc_feature (1)..(2): n is 5-(N-benzylcarboxyamide)-2'-deoxyuridine
  misc_feature (3)..(3): n is 2'-O-methyl-adenosine
  misc_feature (5)..(5): n is hexaethylene glycol
  misc_feature (7)..(7): n is 5-[N-(3-indole-2-ethyl)-carboxyamide]-2'-deoxyuridine
  misc_feature (8)..(8): n is 5-(N-benzylcarboxyamide)-2'-deoxyuridine
  misc_feature (11)..(11): n is 2'-O-methyl-adenosine
  misc_feature (16)..(18): n is 5-(N-benzylcarboxyamide)-2'-deoxyuridine
  misc_feature (20)..(20): n is 5-(N-benzylcarboxyamide)-2'-deoxyuridine
  misc_feature (21)..(21): n is 2'-O-methyl-adenosine
  misc_feature (24)..(24): n is 2'-O-methyl-guanosine
nnncngnnacncgcgnnnanngcn

SEQ ID NO: 140 - DNA, 24 bp, Artificial Sequence
  Synthetic
  misc_feature (1)..(2): n is 5-(N-benzylcarboxyamide)-2'-deoxyuridine
  misc_feature (3)..(3): n is 2'-O-methyl-adenosine
  misc_feature (5)..(5): n is hexaethylene glycol
  misc_feature (7)..(8): n is 5-(N-benzylcarboxyamide)-2'-deoxyuridine
  misc_feature (11)..(11): n is 2'-O-methyl-adenosine
  misc_feature (16)..(17): n is 5-(N-benzylcarboxyamide)-2'-deoxyuridine
  misc_feature (18)..(18): n is 5-[N-(3-indole-2-ethyl)-carboxyamide]-2'-deoxyuridine
  misc_feature (20)..(20): n is 5-(N-benzylcarboxyamide)-2'-deoxyuridine
  misc_feature (21)..(21): n is 2'-O-methyl-adenosine
  misc_feature (24)..(24): n is 2'-O-methyl-guanosine
nnncngnnacncgcgnnnanngcn

SEQ ID NO: 141 - DNA, 24 bp, Artificial Sequence
  Synthetic
  misc_feature (1)..(2): n is 5-(N-benzylcarboxyamide)-2'-deoxyuridine
  misc_feature (3)..(3): n is 2'-O-methyl-adenosine
  misc_feature (5)..(5): n is hexaethylene glycol
  misc_feature (7)..(8): n is 5-(N-benzylcarboxyamide)-2'-deoxyuridine
  misc_feature (11)..(11): n is 2'-O-methyl-adenosine
  misc_feature (16)..(18): n is 5-(N-benzylcarboxyamide)-2'-deoxyuridine
  misc_feature (20)..(20): n is 5-[N-(3-indole-2-ethyl)-carboxyamide]-2'-deoxyuridine
  misc_feature (21)..(21): n is 2'-O-methyl-adenosine
  misc_feature (24)..(24): n is 2'-O-methyl-guanosine
nnncngnnacncgcgnnnanngcn

SEQ ID NO: 142 - DNA, 24 bp, Artificial Sequence
  Synthetic
  misc_feature (1)..(1): n is 5-[N-(2-naphthylmethyl)carboxyamide]-2'-deoxyuridine
  misc_feature (2)..(2): n is 5-(N-benzylcarboxyamide)-2'-deoxyuridine
  misc_feature (3)..(3): n is 2'-O-methyl-adenosine
  misc_feature (5)..(5): n is hexaethylene glycol
  misc_feature (7)..(8): n is 5-(N-benzylcarboxyamide)-2'-deoxyuridine
  misc_feature (11)..(11): n is 2'-O-methyl-adenosine
  misc_feature (16)..(18): n is 5-(N-benzylcarboxyamide)-2'-deoxyuridine
  misc_feature (20)..(20): n is 5-(N-benzylcarboxyamide)-2'-deoxyuridine
  misc_feature (21)..(21): n is 2'-O-methyl-adenosine
  misc_feature (24)..(24): n is 2'-O-methyl-guanosine
nnncngnnacncgcgnnnanngcn

SEQ ID NO: 143 - DNA, 24 bp, Artificial Sequence
  Synthetic
  misc_feature (1)..(1): n is 5-(N-benzylcarboxyamide)-2'-deoxyuridine
  misc_feature (2)..(2): n is 5-[N-(2-naphthylmethyl)carboxyamide]-2'-deoxyuridine
  misc_feature (3)..(3): n is 2'-O-methyl-adenosine
  misc_feature (5)..(5): n is hexaethylene glycol
  misc_feature (7)..(8): n is 5-(N-benzylcarboxyamide)-2'-deoxyuridine
  misc_feature (11)..(11): n is 2'-O-methyl-adenosine
  misc_feature (16)..(18): n is 5-(N-benzylcarboxyamide)-2'-deoxyuridine
  misc_feature (20)..(20): n is 5-(N-benzylcarboxyamide)-2'-deoxyuridine
  misc_feature (21)..(21): n is 2'-O-methyl-adenosine
  misc_feature (24)..(24): n is 2'-O-methyl-guanosine
nnncngnnacncgcgnnnanngcn

SEQ ID NO: 144 - DNA, 24 bp, Artificial Sequence
  Synthetic
  misc_feature (1)..(2): n is 5-(N-benzylcarboxyamide)-2'-deoxyuridine
  misc_feature (3)..(3): n is 2'-O-methyl-adenosine
  misc_feature (5)..(5): n is hexaethylene glycol
  misc_feature (7)..(7): n is 5-[N-(2-naphthylmethyl)carboxyamide]-2'-deoxyuridine
  misc_feature (8)..(8): n is 5-(N-benzylcarboxyamide)-2'-deoxyuridine
  misc_feature (11)..(11): n is 2'-O-methyl-adenosine
  misc_feature (16)..(18): n is 5-(N-benzylcarboxyamide)-2'-deoxyuridine
  misc_feature (20)..(20): n is 5-(N-benzylcarboxyamide)-2'-deoxyuridine
  misc_feature (21)..(21): n is 2'-O-methyl-adenosine
  misc_feature (24)..(24): n is 2'-O-methyl-guanosine
nnncngnnacncgcgnnnanngcn

SEQ ID NO: 145 - DNA, 24 bp, Artificial Sequence
  Synthetic
  misc_feature (1)..(2): n is 5-(N-benzylcarboxyamide)-2'-deoxyuridine
  misc_feature (3)..(3): n is 2'-O-methyl-adenosine
  misc_feature (5)..(5): n is hexaethylene glycol
  misc_feature (7)..(8): n is 5-(N-benzylcarboxyamide)-2'-deoxyuridine
  misc_feature (11)..(11): n is 2'-O-methyl-adenosine
  misc_feature (16)..(16): n is 5-[N-(2-naphthylmethyl)carboxyamide]-2'-deoxyuridine
  misc_feature (17)..(18): n is 5-(N-benzylcarboxyamide)-2'-deoxyuridine
  misc_feature (20)..(20): n is 5-(N-benzylcarboxyamide)-2'-deoxyuridine
  misc_feature (21)..(21): n is 2'-O-methyl-adenosine
  misc_feature (24)..(24): n is 2'-O-methyl-guanosine
nnncngnnacncgcgnnnanngcn

SEQ ID NO: 146 - DNA, 24 bp, Artificial Sequence
  Synthetic
  misc_feature (1)..(2): n is 5-(N-benzylcarboxyamide)-2'-deoxyuridine
  misc_feature (3)..(3): n is 2'-O-methyl-adenosine
  misc_feature (5)..(5): n is hexaethylene glycol
  misc_feature (7)..(8): n is 5-(N-benzylcarboxyamide)-2'-deoxyuridine
  misc_feature (11)..(11): n is 2'-O-methyl-adenosine
  misc_feature (16)..(16): n is 5-(N-benzylcarboxyamide)-2'-deoxyuridine
  misc_feature (17)..(17): n is 5-[N-(2-naphthylmethyl)carboxyamide]-2'-deoxyuridine
  misc_feature (18)..(18): n is 5-(N-benzylcarboxyamide)-2'-deoxyuridine
  misc_feature (20)..(20): n is 5-(N-benzylcarboxyamide)-2'-deoxyuridine
  misc_feature (21)..(21): n is 2'-O-methyl-adenosine
  misc_feature (24)..(24): n is 2'-O-methyl-guanosine
nnncngnnacncgcgnnnanngcn

SEQ ID NO: 147 - DNA, 24 bp, Artificial Sequence
  Synthetic
  misc_feature (1)..(2): n is 5-(N-benzylcarboxyamide)-2'-deoxyuridine
  misc_feature (3)..(3): n is 2'-O-methyl-adenosine
  misc_feature (5)..(5): n is hexaethylene glycol
  misc_feature (7)..(8): n is 5-(N-benzylcarboxyamide)-2'-deoxyuridine
  misc_feature (11)..(11): n is 2'-O-methyl-adenosine
  misc_feature (16)..(17): n is 5-(N-benzylcarboxyamide)-2'-deoxyuridine
  misc_feature (18)..(18): n is 5-[N-(2-naphthylmethyl)carboxyamide]-2'-deoxyuridine
  misc_feature (20)..(20): n is 5-(N-benzylcarboxyamide)-2'-deoxyuridine
  misc_feature (21)..(21): n is 2'-O-methyl-adenosine
  misc_feature (24)..(24): n is 2'-O-methyl-guanosine
nnncngnnacncgcgnnnanngcn

SEQ ID NO: 148 - DNA, 24 bp, Artificial Sequence
  Synthetic
  misc_feature (1)..(2): n is 5-(N-benzylcarboxyamide)-2'-deoxyuridine
  misc_feature (3)..(3): n is 2'-O-methyl-adenosine
  misc_feature (5)..(5): n is hexaethylene glycol
  misc_feature (7)..(8): n is 5-(N-benzylcarboxyamide)-2'-deoxyuridine
  misc_feature (11)..(11): n is 2'-O-methyl-adenosine
  misc_feature (16)..(18): n is 5-(N-benzylcarboxyamide)-2'-deoxyuridine
  misc_feature (20)..(20): n is 5-[N-(2-naphthylmethyl)carboxyamide]-2'-deoxyuridine
  misc_feature (21)..(21): n is 2'-O-methyl-adenosine
  misc_feature (24)..(24): n is 2'-O-methyl-guanosine
nnncngnnacncgcgnnnanngcn

SEQ ID NO: 149 - DNA, 24 bp, Artificial Sequence
  Synthetic
  misc_feature (1)..(1): n is 5-[N-(2-naphthyl-2-ethyl)carboxyamide]-2'-deoxyuridine
  misc_feature (2)..(2): n is 5-(N-benzylcarboxyamide)-2'-deoxyuridine
  misc_feature (3)..(3): n is 2'-O-methyl-adenosine
  misc_feature (5)..(5): n is hexaethylene glycol
  misc_feature (7)..(8): n is 5-(N-benzylcarboxyamide)-2'-deoxyuridine
  misc_feature (11)..(11): n is 2'-O-methyl-adenosine
  misc_feature (16)..(18): n is 5-(N-benzylcarboxyamide)-2'-deoxyuridine
  misc_feature (20)..(20): n is 5-(N-benzylcarboxyamide)-2'-deoxyuridine
  misc_feature (21)..(21): n is 2'-O-methyl-adenosine
  misc_feature (24)..(24): n is 2'-O-methyl-guanosine
nnncngnnacncgcgnnnanngcn

SEQ ID NO: 150 - DNA, 24 bp, Artificial Sequence
  Synthetic
  misc_feature (1)..(1): n is 5-(N-benzylcarboxyamide)-2'-deoxyuridine
  misc_feature (2)..(2): n is 5-[N-(2-naphthyl-2-ethyl)carboxyamide]-2'-deoxyuridine
  misc_feature (3)..(3): n is 2'-O-methyl-adenosine
  misc_feature (5)..(5): n is hexaethylene glycol
  misc_feature (7)..(8): n is 5-(N-benzylcarboxyamide)-2'-deoxyuridine
  misc_feature (11)..(11): n is 2'-O-methyl-adenosine
  misc_feature (16)..(18): n is 5-(N-benzylcarboxyamide)-2'-deoxyuridine
  misc_feature (20)..(20): n is 5-(N-benzylcarboxyamide)-2'-deoxyuridine
  misc_feature (21)..(21): n is 2'-O-methyl-adenosine
  misc_feature (24)..(24): n is 2'-O-methyl-guanosine
nnncngnnacncgcgnnnanngcn

SEQ ID NO: 151 - DNA, 24 bp, Artificial Sequence
  Synthetic
  misc_feature (1)..(2): n is 5-(N-benzylcarboxyamide)-2'-deoxyuridine
  misc_feature (3)..(3): n is 2'-O-methyl-adenosine
  misc_feature (5)..(5): n is hexaethylene glycol
  misc_feature (7)..(7): n is 5-[N-(2-naphthyl-2-ethyl)carboxyamide]-2'-deoxyuridine
  misc_feature (8)..(8): n is 5-(N-benzylcarboxyamide)-2'-deoxyuridine
  misc_feature (11)..(11): n is 2'-O-methyl-adenosine
  misc_feature (16)..(18): n is 5-(N-benzylcarboxyamide)-2'-deoxyuridine
  misc_feature (20)..(20): n is 5-(N-benzylcarboxyamide)-2'-deoxyuridine
  misc_feature (21)..(21): n is 2'-O-methyl-adenosine
  misc_feature (24)..(24): n is 2'-O-methyl-guanosine
nnncngnnacncgcgnnnanngcn

SEQ ID NO: 152 - DNA, 24 bp, Artificial Sequence
  Synthetic
  misc_feature (1)..(2): n is 5-(N-benzylcarboxyamide)-2'-deoxyuridine
  misc_feature (3)..(3): n is 2'-O-methyl-adenosine
  misc_feature (5)..(5): n is hexaethylene glycol
  misc_feature (7)..(7): n is 5-(N-benzylcarboxyamide)-2'-deoxyuridine
  misc_feature (8)..(8): n is 5-[N-(2-naphthyl-2-ethyl)carboxyamide]-2'-deoxyuridine
  misc_feature (11)..(11): n is 2'-O-methyl-adenosine
  misc_feature (16)..(18): n is 5-(N-benzylcarboxyamide)-2'-deoxyuridine
  misc_feature (20)..(20): n is 5-(N-benzylcarboxyamide)-2'-deoxyuridine
  misc_feature (21)..(21): n is 2'-O-methyl-adenosine
  misc_feature (24)..(24): n is 2'-O-methyl-guanosine
nnncngnnacncgcgnnnanngcn

SEQ ID NO: 153 - DNA, 24 bp, Artificial Sequence
  Synthetic
  misc_feature (1)..(2): n is 5-(N-benzylcarboxyamide)-2'-deoxyuridine
  misc_feature (3)..(3): n is 2'-O-methyl-adenosine
  misc_feature (5)..(5): n is hexaethylene glycol
  misc_feature (7)..(8): n is 5-(N-benzylcarboxyamide)-2'-deoxyuridine
  misc_feature (11)..(11): n is 2'-O-methyl-adenosine
  misc_feature (16)..(16): n is 5-[N-(2-naphthyl-2-ethyl)carboxyamide]-2'-deoxyuridine
  misc_feature (17)..(18): n is 5-(N-benzylcarboxyamide)-2'-deoxyuridine
  misc_feature (20)..(20): n is 5-(N-benzylcarboxyamide)-2'-deoxyuridine
  misc_feature (21)..(21): n is 2'-O-methyl-adenosine
  misc_feature (24)..(24): n is 2'-O-methyl-guanosine
nnncngnnacncgcgnnnanngcn

SEQ ID NO: 154 - DNA, 24 bp, Artificial Sequence
  Synthetic
  misc_feature (1)..(2): n is 5-(N-benzylcarboxyamide)-2'-deoxyuridine
  misc_feature (3)..(3): n is 2'-O-methyl-adenosine
  misc_feature (5)..(5): n is hexaethylene glycol
  misc_feature (7)..(8): n is 5-(N-benzylcarboxyamide)-2'-deoxyuridine
  misc_feature (11)..(11): n is 2'-O-methyl-adenosine
  misc_feature (16)..(17): n is 5-(N-benzylcarboxyamide)-2'-deoxyuridine
  misc_feature (18)..(18): n is 5-[N-(2-naphthyl-2-ethyl)carboxyamide]-2'-deoxyuridine
  misc_feature (20)..(20): n is 5-(N-benzylcarboxyamide)-2'-deoxyuridine
  misc_feature (21)..(21): n is 2'-O-methyl-adenosine
  misc_feature (24)..(24): n is 2'-O-methyl-guanosine
nnncngnnacncgcgnnnanngcn

SEQ ID NO: 155 - DNA, 24 bp, Artificial Sequence
  Synthetic
  misc_feature (1)..(2): n is 5-(N-benzylcarboxyamide)-2'-deoxyuridine
  misc_feature (3)..(3): n is 2'-O-methyl-adenosine
  misc_feature (5)..(5): n is hexaethylene glycol
  misc_feature (7)..(8): n is 5-(N-benzylcarboxyamide)-2'-deoxyuridine
  misc_feature (11)..(11): n is 2'-O-methyl-adenosine
  misc_feature (16)..(18): n is 5-(N-benzylcarboxyamide)-2'-deoxyuridine
  misc_feature (20)..(20): n is 5-[N-(2-naphthyl-2-ethyl)carboxyamide]-2'-deoxyuridine
  misc_feature (21)..(21): n is 2'-O-methyl-adenosine
  misc_feature (24)..(24): n is 2'-O-methyl-guanosine
nnncngnnacncgcgnnnanngcn

SEQ ID NO: 156 - DNA, 24 bp, Artificial Sequence
  Synthetic
  misc_feature (1)..(1): n is 5-[N-(1-naphthyl-2-ethyl)carboxyamide]-2'-deoxyuridine
  misc_feature (2)..(2): n is 5-(N-benzylcarboxyamide)-2'-deoxyuridine
  misc_feature (3)..(3): n is 2'-O-methyl-adenosine
  misc_feature (5)..(5): n is hexaethylene glycol
  misc_feature (7)..(8): n is 5-(N-benzylcarboxyamide)-2'-deoxyuridine
  misc_feature (11)..(11): n is 2'-O-methyl-adenosine
  misc_feature (16)..(18): n is 5-(N-benzylcarboxyamide)-2'-deoxyuridine
  misc_feature (20)..(20): n is 5-(N-benzylcarboxyamide)-2'-deoxyuridine
  misc_feature (21)..(21): n is 2'-O-methyl-adenosine
  misc_feature (24)..(24): n is 2'-O-methyl-guanosine
nnncngnnacncgcgnnnanngcn

SEQ ID NO: 157 - DNA, 24 bp, Artificial Sequence
  Synthetic
  misc_feature (1)..(1): n is 5-(N-benzylcarboxyamide)-2'-deoxyuridine
  misc_feature (2)..(2): n is 5-[N-(1-naphthyl-2-ethyl)carboxyamide]-2'-deoxyuridine
  misc_feature (3)..(3): n is 2'-O-methyl-adenosine
  misc_feature (5)..(5): n is hexaethylene glycol
  misc_feature (7)..(8): n is 5-(N-benzylcarboxyamide)-2'-deoxyuridine
  misc_feature (11)..(11): n is 2'-O-methyl-adenosine
  misc_feature (16)..(18): n is 5-(N-benzylcarboxyamide)-2'-deoxyuridine
  misc_feature (20)..(20): n is 5-(N-benzylcarboxyamide)-2'-deoxyuridine
  misc_feature (21)..(21): n is 2'-O-methyl-adenosine
  misc_feature (24)..(24): n is 2'-O-methyl-guanosine
nnncngnnacncgcgnnnanngcn

SEQ ID NO: 158 - DNA, 24 bp, Artificial Sequence
  Synthetic
  misc_feature (1)..(2): n is 5-(N-benzylcarboxyamide)-2'-deoxyuridine
  misc_feature (3)..(3): n is 2'-O-methyl-adenosine
  misc_feature (5)..(5): n is hexaethylene glycol
  misc_feature (7)..(7): n is 5-[N-(1-naphthyl-2-ethyl)carboxyamide]-2'-deoxyuridine
  misc_feature (8)..(8): n is 5-(N-benzylcarboxyamide)-2'-deoxyuridine
  misc_feature (11)..(11): n is 2'-O-methyl-adenosine
  misc_feature (16)..(18): n is 5-(N-benzylcarboxyamide)-2'-deoxyuridine
  misc_feature (20)..(20): n is 5-(N-benzylcarboxyamide)-2'-deoxyuridine
  misc_feature (21)..(21): n is 2'-O-methyl-adenosine
  misc_feature (24)..(24): n is 2'-O-methyl-guanosine
nnncngnnacncgcgnnnanngcn

SEQ ID NO: 159 - DNA, 24 bp, Artificial Sequence
  Synthetic
  misc_feature (1)..(2): n is 5-(N-benzylcarboxyamide)-2'-deoxyuridine
  misc_feature (3)..(3): n is 2'-O-methyl-adenosine
  misc_feature (5)..(5): n is hexaethylene glycol
  misc_feature (7)..(7): n is 5-(N-benzylcarboxyamide)-2'-deoxyuridine
  misc_feature (8)..(8): n is 5-[N-(1-naphthyl-2-ethyl)carboxyamide]-2'-deoxyuridine
  misc_feature (11)..(11): n is 2'-O-methyl-adenosine
  misc_feature (16)..(18): n is 5-(N-benzylcarboxyamide)-2'-deoxyuridine
  misc_feature (20)..(20): n is 5-(N-benzylcarboxyamide)-2'-deoxyuridine
  misc_feature (21)..(21): n is 2'-O-methyl-adenosine
  misc_feature (24)..(24): n is 2'-O-methyl-guanosine
nnncngnnacncgcgnnnanngcn

SEQ ID NO: 160 - DNA, 24 bp, Artificial Sequence
  Synthetic
  misc_feature (1)..(2): n is 5-(N-benzylcarboxyamide)-2'-deoxyuridine
  misc_feature (3)..(3): n is 2'-O-methyl-adenosine
  misc_feature (5)..(5): n is hexaethylene glycol
  misc_feature (7)..(8): n is 5-(N-benzylcarboxyamide)-2'-deoxyuridine
  misc_feature (11)..(11): n is 2'-O-methyl-adenosine
  misc_feature (16)..(16): n is 5-[N-(1-naphthyl-2-ethyl)carboxyamide]-2'-deoxyuridine
  misc_feature (17)..(18): n is 5-(N-benzylcarboxyamide)-2'-deoxyuridine
  misc_feature (20)..(20): n is 5-(N-benzylcarboxyamide)-2'-deoxyuridine
  misc_feature (21)..(21): n is 2'-O-methyl-adenosine
  misc_feature (24)..(24): n is 2'-O-methyl-guanosine
nnncngnnacncgcgnnnanngcn

SEQ ID NO: 161 - DNA, 24 bp, Artificial Sequence
  Synthetic
  misc_feature (1)..(2): n is 5-(N-benzylcarboxyamide)-2'-deoxyuridine
  misc_feature (3)..(3): n is 2'-O-methyl-adenosine
  misc_feature (5)..(5): n is hexaethylene glycol
  misc_feature (7)..(8): n is 5-(N-benzylcarboxyamide)-2'-deoxyuridine
  misc_feature (11)..(11): n is 2'-O-methyl-adenosine
  misc_feature (16)..(16): n is 5-(N-benzylcarboxyamide)-2'-deoxyuridine
  misc_feature (17)..(17): n is 5-[N-(1-naphthyl-2-ethyl)carboxyamide]-2'-deoxyuridine
  misc_feature (18)..(18): n is 5-(N-benzylcarboxyamide)-2'-deoxyuridine
  misc_feature (20)..(20): n is 5-(N-benzylcarboxyamide)-2'-deoxyuridine
  misc_feature (21)..(21): n is 2'-O-methyl-adenosine
  misc_feature (24)..(24): n is 2'-O-methyl-guanosine
nnncngnnacncgcgnnnanngcn

SEQ ID NO: 162 - DNA, 24 bp, Artificial Sequence
  Synthetic
  misc_feature (1)..(2): n is 5-(N-benzylcarboxyamide)-2'-deoxyuridine
  misc_feature (3)..(3): n is 2'-O-methyl-adenosine
  misc_feature (5)..(5): n is hexaethylene glycol
  misc_feature (7)..(8): n is 5-(N-benzylcarboxyamide)-2'-deoxyuridine
  misc_feature (11)..(11): n is 2'-O-methyl-adenosine
  misc_feature (16)..(17): n is 5-(N-benzylcarboxyamide)-2'-deoxyuridine
  misc_feature (18)..(18): n is 5-[N-(1-naphthyl-2-ethyl)carboxyamide]-2'-deoxyuridine
  misc_feature (20)..(20): n is 5-(N-benzylcarboxyamide)-2'-deoxyuridine
  misc_feature (21)..(21): n is 2'-O-methyl-adenosine
  misc_feature (24)..(24): n is 2'-O-methyl-guanosine
nnncngnnacncgcgnnnanngcn

SEQ ID NO: 163 - DNA, 24 bp, Artificial Sequence
  Synthetic
  misc_feature (1)..(2): n is 5-(N-benzylcarboxyamide)-2'-deoxyuridine
  misc_feature (3)..(3): n is 2'-O-methyl-adenosine
  misc_feature (5)..(5): n is hexaethylene glycol
  misc_feature (7)..(8): n is 5-(N-benzylcarboxyamide)-2'-deoxyuridine
  misc_feature (11)..(11): n is 2'-O-methyl-adenosine
  misc_feature (16)..(18): n is 5-(N-benzylcarboxyamide)-2'-deoxyuridine
  misc_feature (20)..(20): n is 5-[N-(1-naphthyl-2-ethyl)carboxyamide]-2'-deoxyuridine
  misc_feature (21)..(21): n is 2'-O-methyl-adenosine
  misc_feature (24)..(24): n is 2'-O-methyl-guanosine
nnncngnnacncgcgnnnanngcn

SEQ ID NO: 164 - DNA, 24 bp, Artificial Sequence
  Synthetic
  misc_feature (1)..(1): n is 5-[N-(3,4-methylenedioxyphenyl-methyl)carboxyamide]-2'-deoxyuridi ne
  misc_feature (2)..(2): n is 5-(N-benzylcarboxyamide)-2'-deoxyuridine
  misc_feature (3)..(3): n is 2'-O-methyl-adenosine
  misc_feature (5)..(5): n is hexaethylene glycol
  misc_feature (7)..(8): n is 5-(N-benzylcarboxyamide)-2'-deoxyuridine
  misc_feature (11)..(11): n is 2'-O-methyl-adenosine
  misc_feature (16)..(18): n is 5-(N-benzylcarboxyamide)-2'-deoxyuridine
  misc_feature (20)..(20): n is 5-(N-benzylcarboxyamide)-2'-deoxyuridine
  misc_feature (21)..(21): n is 2'-O-methyl-adenosine
  misc_feature (24)..(24): n is 2'-O-methyl-guanosine
nnncngnnacncgcgnnnanngcn

SEQ ID NO: 165 - DNA, 24 bp, Artificial Sequence
  Synthetic
  misc_feature (1)..(1): n is 5-(N-benzylcarboxyamide)-2'-deoxyuridine
  misc_feature (2)..(2): n is 5-[N-(3,4-methylenedioxyphenyl-methyl)carboxyamide]-2'-deoxyuridi ne
  misc_feature (3)..(3): n is 2'-O-methyl-adenosine
  misc_feature (5)..(5): n is hexaethylene glycol
  misc_feature (7)..(8): n is 5-(N-benzylcarboxyamide)-2'-deoxyuridine
  misc_feature (11)..(11): n is 2'-O-methyl-adenosine
  misc_feature (16)..(18): n is 5-(N-benzylcarboxyamide)-2'-deoxyuridine
  misc_feature (20)..(20): n is 5-(N-benzylcarboxyamide)-2'-deoxyuridine
  misc_feature (21)..(21): n is 2'-O-methyl-adenosine
  misc_feature (24)..(24): n is 2'-O-methyl-guanosine
nnncngnnacncgcgnnnanngcn

SEQ ID NO: 166 - DNA, 24 bp, Artificial Sequence
  Synthetic
  misc_feature (1)..(2): n is 5-(N-benzylcarboxyamide)-2'-deoxyuridine
  misc_feature (3)..(3): n is 2'-O-methyl-adenosine
  misc_feature (5)..(5): n is hexaethylene glycol
  misc_feature (7)..(7): n is 5-[N-(3,4-methylenedioxyphenyl-methyl)carboxyamide]-2'-deoxyuridi ne
  misc_feature (8)..(8): n is 5-(N-benzylcarboxyamide)-2'-deoxyuridine
  misc_feature (11)..(11): n is 2'-O-methyl-adenosine
  misc_feature (16)..(18): n is 5-(N-benzylcarboxyamide)-2'-deoxyuridine
  misc_feature (20)..(20): n is 5-(N-benzylcarboxyamide)-2'-deoxyuridine
  misc_feature (21)..(21): n is 2'-O-methyl-adenosine
  misc_feature (24)..(24): n is 2'-O-methyl-guanosine
nnncngnnacncgcgnnnanngcn

SEQ ID NO: 167 - DNA, 24 bp, Artificial Sequence
  Synthetic
  misc_feature (1)..(2): n is 5-(N-benzylcarboxyamide)-2'-deoxyuridine
  misc_feature (3)..(3): n is 2'-O-methyl-adenosine
  misc_feature (5)..(5): n is hexaethylene glycol
  misc_feature (7)..(7): n is 5-(N-benzylcarboxyamide)-2'-deoxyuridine
  misc_feature (8)..(8): n is 5-[N-(3,4-methylenedioxyphenyl-methyl)carboxyamide]-2'-deoxyuridi ne
  misc_feature (11)..(11): n is 2'-O-methyl-adenosine
  misc_feature (16)..(18): n is 5-(N-benzylcarboxyamide)-2'-deoxyuridine
  misc_feature (20)..(20): n is 5-(N-benzylcarboxyamide)-2'-deoxyuridine
  misc_feature (21)..(21): n is 2'-O-methyl-adenosine
  misc_feature (24)..(24): n is 2'-O-methyl-guanosine
nnncngnnacncgcgnnnanngcn

SEQ ID NO: 168 - DNA, 24 bp, Artificial Sequence
  Synthetic
  misc_feature (1)..(2): n is 5-(N-benzylcarboxyamide)-2'-deoxyuridine
  misc_feature (3)..(3): n is 2'-O-methyl-adenosine
  misc_feature (5)..(5): n is hexaethylene glycol
  misc_feature (7)..(8): n is 5-(N-benzylcarboxyamide)-2'-deoxyuridine
  misc_feature (11)..(11): n is 2'-O-methyl-adenosine
  misc_feature (16)..(16): n is 5-[N-(3,4-methylenedioxyphenyl-methyl)carboxyamide]-2'-deoxyuridi ne
  misc_feature (17)..(18): n is 5-(N-benzylcarboxyamide)-2'-deoxyuridine
  misc_feature (20)..(20): n is 5-(N-benzylcarboxyamide)-2'-deoxyuridine
  misc_feature (21)..(21): n is 2'-O-methyl-adenosine
  misc_feature (24)..(24): n is 2'-O-methyl-guanosine
nnncngnnacncgcgnnnanngcn

SEQ ID NO: 169 - DNA, 24 bp, Artificial Sequence
  Synthetic
  misc_feature (1)..(2): n is 5-(N-benzylcarboxyamide)-2'-deoxyuridine
  misc_feature (3)..(3): n is 2'-O-methyl-adenosine
  misc_feature (5)..(5): n is hexaethylene glycol
  misc_feature (7)..(8): n is 5-(N-benzylcarboxyamide)-2'-deoxyuridine
  misc_feature (11)..(11): n is 2'-O-methyl-adenosine
  misc_feature (16)..(16): n is 5-(N-benzylcarboxyamide)-2'-deoxyuridine
  misc_feature (17)..(17): n is 5-[N-(3,4-methylenedioxyphenyl-methyl)carboxyamide]-2'-deoxyuridi ne
  misc_feature (18)..(18): n is 5-(N-benzylcarboxyamide)-2'-deoxyuridine
  misc_feature (20)..(20): n is 5-(N-benzylcarboxyamide)-2'-deoxyuridine
  misc_feature (21)..(21): n is 2'-O-methyl-adenosine
  misc_feature (24)..(24): n is 2'-O-methyl-guanosine
nnncngnnacncgcgnnnanngcn

SEQ ID NO: 170 - DNA, 24 bp, Artificial Sequence
  Synthetic
  misc_feature (1)..(2): n is 5-(N-benzylcarboxyamide)-2'-deoxyuridine
  misc_feature (3)..(3): n is 2'-O-methyl-adenosine
  misc_feature (5)..(5): n is hexaethylene glycol
  misc_feature (7)..(8): n is 5-(N-benzylcarboxyamide)-2'-deoxyuridine
  misc_feature (11)..(11): n is 2'-O-methyl-adenosine
  misc_feature (16)..(17): n is 5-(N-benzylcarboxyamide)-2'-deoxyuridine
  misc_feature (18)..(18): n is 5-[N-(3,4-methylenedioxyphenyl-methyl)carboxyamide]-2'-deoxyuridi ne
  misc_feature (20)..(20): n is 5-(N-benzylcarboxyamide)-2'-deoxyuridine
  misc_feature (21)..(21): n is 2'-O-methyl-adenosine
  misc_feature (24)..(24): n is 2'-O-methyl-guanosine
nnncngnnacncgcgnnnanngcn

SEQ ID NO: 171 - DNA, 24 bp, Artificial Sequence
  Synthetic
  misc_feature (1)..(2): n is 5-(N-benzylcarboxyamide)-2'-deoxyuridine
  misc_feature (3)..(3): n is 2'-O-methyl-adenosine
  misc_feature (5)..(5): n is hexaethylene glycol
  misc_feature (7)..(8): n is 5-(N-benzylcarboxyamide)-2'-deoxyuridine
  misc_feature (11)..(11): n is 2'-O-methyl-adenosine
  misc_feature (16)..(18): n is 5-(N-benzylcarboxyamide)-2'-deoxyuridine
  misc_feature (20)..(20): n is 5-[N-(3,4-methylenedioxyphenyl-methyl)carboxyamide]-2'-deoxyuridi ne
  misc_feature (21)..(21): n is 2'-O-methyl-adenosine
  misc_feature (24)..(24): n is 2'-O-methyl-guanosine
nnncngnnacncgcgnnnanngcn

SEQ ID NO: 172 - DNA, 24 bp, Artificial Sequence
  Synthetic
  misc_feature (1)..(1): n is 5-[N-(phenyl-3-propyl)-carboxyamide]-2'-deoxyuridine
  misc_feature (2)..(2): n is 5-(N-benzylcarboxyamide)-2'-deoxyuridine
  misc_feature (3)..(3): n is 2'-O-methyl-adenosine
  misc_feature (5)..(5): n is hexaethylene glycol
  misc_feature (7)..(8): n is 5-(N-benzylcarboxyamide)-2'-deoxyuridine
  misc_feature (11)..(11): n is 2'-O-methyl-adenosine
  misc_feature (16)..(18): n is 5-(N-benzylcarboxyamide)-2'-deoxyuridine
  misc_feature (20)..(20): n is 5-(N-benzylcarboxyamide)-2'-deoxyuridine
  misc_feature (21)..(21): n is 2'-O-methyl-adenosine
  misc_feature (24)..(24): n is 2'-O-methyl-guanosine
nnncngnnacncgcgnnnanngcn

SEQ ID NO: 173 - DNA, 24 bp, Artificial Sequence
  Synthetic
  misc_feature (1)..(1): n is 5-(N-benzylcarboxyamide)-2'-deoxyuridine
  misc_feature (2)..(2): n is 5-[N-(phenyl-3-propyl)-carboxyamide]-2'-deoxyuridine
  misc_feature (3)..(3): n is 2'-O-methyl-adenosine
  misc_feature (5)..(5): n is hexaethylene glycol
  misc_feature (7)..(8): n is 5-(N-benzylcarboxyamide)-2'-deoxyuridine
  misc_feature (11)..(11): n is 2'-O-methyl-adenosine
  misc_feature (16)..(18): n is 5-(N-benzylcarboxyamide)-2'-deoxyuridine
  misc_feature (20)..(20): n is 5-(N-benzylcarboxyamide)-2'-deoxyuridine
  misc_feature (21)..(21): n is 2'-O-methyl-adenosine
  misc_feature (24)..(24): n is 2'-O-methyl-guanosine
nnncngnnacncgcgnnnanngcn

SEQ ID NO: 174 - DNA, 24 bp, Artificial Sequence
  Synthetic
  misc_feature (1)..(2): n is 5-(N-benzylcarboxyamide)-2'-deoxyuridine
  misc_feature (3)..(3): n is 2'-O-methyl-adenosine
  misc_feature (5)..(5): n is hexaethylene glycol
  misc_feature (7)..(7): n is 5-[N-(phenyl-3-propyl)-carboxyamide]-2'-deoxyuridine
  misc_feature (8)..(8): n is 5-(N-benzylcarboxyamide)-2'-deoxyuridine
  misc_feature (11)..(11): n is 2'-O-methyl-adenosine
  misc_feature (16)..(18): n is 5-(N-benzylcarboxyamide)-2'-deoxyuridine
  misc_feature (20)..(20): n is 5-(N-benzylcarboxyamide)-2'-deoxyuridine
  misc_feature (21)..(21): n is 2'-O-methyl-adenosine
  misc_feature (24)..(24): n is 2'-O-methyl-guanosine
nnncngnnacncgcgnnnanngcn

SEQ ID NO: 175 - DNA, 24 bp, Artificial Sequence
  Synthetic
  misc_feature (1)..(2): n is 5-(N-benzylcarboxyamide)-2'-deoxyuridine
  misc_feature (3)..(3): n is 2'-O-methyl-adenosine
  misc_feature (5)..(5): n is hexaethylene glycol
  misc_feature (7)..(7): n is 5-(N-benzylcarboxyamide)-2'-deoxyuridine
  misc_feature (8)..(8): n is 5-[N-(phenyl-3-propyl)-carboxyamide]-2'-deoxyuridine
  misc_feature (11)..(11): n is 2'-O-methyl-adenosine
  misc_feature (16)..(18): n is 5-(N-benzylcarboxyamide)-2'-deoxyuridine
  misc_feature (20)..(20): n is 5-(N-benzylcarboxyamide)-2'-deoxyuridine
  misc_feature (21)..(21): n is 2'-O-methyl-adenosine
  misc_feature (24)..(24): n is 2'-O-methyl-guanosine
nnncngnnacncgcgnnnanngcn

SEQ ID NO: 176 - DNA, 24 bp, Artificial Sequence
  Synthetic
  misc_feature (1)..(2): n is 5-(N-benzylcarboxyamide)-2'-deoxyuridine
  misc_feature (3)..(3): n is 2'-O-methyl-adenosine
  misc_feature (5)..(5): n is hexaethylene glycol
  misc_feature (7)..(8): n is 5-(N-benzylcarboxyamide)-2'-deoxyuridine
  misc_feature (11)..(11): n is 2'-O-methyl-adenosine
  misc_feature (16)..(16): n is 5-[N-(phenyl-3-propyl)-carboxyamide]-2'-deoxyuridine
  misc_feature (17)..(18): n is 5-(N-benzylcarboxyamide)-2'-deoxyuridine
  misc_feature (20)..(20): n is 5-(N-benzylcarboxyamide)-2'-deoxyuridine
  misc_feature (21)..(21): n is 2'-O-methyl-adenosine
  misc_feature (24)..(24): n is 2'-O-methyl-guanosine
nnncngnnacncgcgnnnanngcn

SEQ ID NO: 177 - DNA, 24 bp, Artificial Sequence
  Synthetic
  misc_feature (1)..(2): n is 5-(N-benzylcarboxyamide)-2'-deoxyuridine
  misc_feature (3)..(3): n is 2'-O-methyl-adenosine
  misc_feature (5)..(5): n is hexaethylene glycol
  misc_feature (7)..(8): n is 5-(N-benzylcarboxyamide)-2'-deoxyuridine
  misc_feature (11)..(11): n is 2'-O-methyl-adenosine
  misc_feature (16)..(16): n is 5-(N-benzylcarboxyamide)-2'-deoxyuridine
  misc_feature (17)..(17): n is 5-[N-(phenyl-3-propyl)-carboxyamide]-2'-deoxyuridine
  misc_feature (18)..(18): n is 5-(N-benzylcarboxyamide)-2'-deoxyuridine
  misc_feature (20)..(20): n is 5-(N-benzylcarboxyamide)-2'-deoxyuridine
  misc_feature (21)..(21): n is 2'-O-methyl-adenosine
  misc_feature (24)..(24): n is 2'-O-methyl-guanosine
nnncngnnacncgcgnnnanngcn

SEQ ID NO: 178 - DNA, 24 bp, Artificial Sequence
  Synthetic
  misc_feature (1)..(2): n is 5-(N-benzylcarboxyamide)-2'-deoxyuridine
  misc_feature (3)..(3): n is 2'-O-methyl-adenosine
  misc_feature (5)..(5): n is hexaethylene glycol
  misc_feature (7)..(8): n is 5-(N-benzylcarboxyamide)-2'-deoxyuridine
  misc_feature (11)..(11): n is 2'-O-methyl-adenosine
  misc_feature (16)..(17): n is 5-(N-benzylcarboxyamide)-2'-deoxyuridine
  misc_feature (18)..(18): n is 5-[N-(phenyl-3-propyl)-carboxyamide]-2'-deoxyuridine
  misc_feature (20)..(20): n is 5-(N-benzylcarboxyamide)-2'-deoxyuridine
  misc_feature (21)..(21): n is 2'-O-methyl-adenosine
  misc_feature (24)..(24): n is 2'-O-methyl-guanosine
nnncngnnacncgcgnnnanngcn

SEQ ID NO: 179 - DNA, 24 bp, Artificial Sequence
  Synthetic
  misc_feature (1)..(2): n is 5-(N-benzylcarboxyamide)-2'-deoxyuridine
  misc_feature (3)..(3): n is 2'-O-methyl-adenosine
  misc_feature (5)..(5): n is hexaethylene glycol
  misc_feature (7)..(8): n is 5-(N-benzylcarboxyamide)-2'-deoxyuridine
  misc_feature (11)..(11): n is 2'-O-methyl-adenosine
  misc_feature (16)..(18): n is 5-(N-benzylcarboxyamide)-2'-deoxyuridine
  misc_feature (20)..(20): n is 5-[N-(phenyl-3-propyl)-carboxyamide]-2'-deoxyuridine
  misc_feature (21)..(21): n is 2'-O-methyl-adenosine
  misc_feature (24)..(24): n is 2'-O-methyl-guanosine
nnncngnnacncgcgnnnanngcn

SEQ ID NO: 180 - DNA, 24 bp, Artificial Sequence
  Synthetic
  misc_feature (1)..(1): n is 5-[N-(4-hydroxyphenyl-2-ethyl)carboxyamide]-2'-deoxyuridine
  misc_feature (2)..(2): n is 5-(N-benzylcarboxyamide)-2'-deoxyuridine
  misc_feature (3)..(3): n is 2'-O-methyl-adenosine
  misc_feature (5)..(5): n is hexaethylene glycol
  misc_feature (7)..(8): n is 5-(N-benzylcarboxyamide)-2'-deoxyuridine
  misc_feature (11)..(11): n is 2'-O-methyl-adenosine
  misc_feature (16)..(18): n is 5-(N-benzylcarboxyamide)-2'-deoxyuridine
  misc_feature (20)..(20): n is 5-(N-benzylcarboxyamide)-2'-deoxyuridine
  misc_feature (21)..(21): n is 2'-O-methyl-adenosine
  misc_feature (24)..(24): n is 2'-O-methyl-guanosine
nnncngnnacncgcgnnnanngcn

SEQ ID NO: 181 - DNA, 24 bp, Artificial Sequence
  Synthetic
  misc_feature (1)..(1): n is 5-(N-benzylcarboxyamide)-2'-deoxyuridine
  misc_feature (2)..(2): n is 5-[N-(4-hydroxyphenyl-2-ethyl)carboxyamide]-2'-deoxyuridine
  misc_feature (3)..(3): n is 2'-O-methyl-adenosine
  misc_feature (5)..(5): n is hexaethylene glycol
  misc_feature (7)..(8): n is 5-(N-benzylcarboxyamide)-2'-deoxyuridine
  misc_feature (11)..(11): n is 2'-O-methyl-adenosine
  misc_feature (16)..(18): n is 5-(N-benzylcarboxyamide)-2'-deoxyuridine
  misc_feature (20)..(20): n is 5-(N-benzylcarboxyamide)-2'-deoxyuridine
  misc_feature (21)..(21): n is 2'-O-methyl-adenosine
  misc_feature (24)..(24): n is 2'-O-methyl-guanosine
nnncngnnacncgcgnnnanngcn

SEQ ID NO: 182 - DNA, 24 bp, Artificial Sequence
  Synthetic
  misc_feature (1)..(2): n is 5-(N-benzylcarboxyamide)-2'-deoxyuridine
  misc_feature (3)..(3): n is 2'-O-methyl-adenosine
  misc_feature (5)..(5): n is hexaethylene glycol
  misc_feature (7)..(7): n is 5-[N-(4-hydroxyphenyl-2-ethyl)carboxyamide]-2'-deoxyuridine
  misc_feature (8)..(8): n is 5-(N-benzylcarboxyamide)-2'-deoxyuridine
  misc_feature (11)..(11): n is 2'-O-methyl-adenosine
  misc_feature (16)..(18): n is 5-(N-benzylcarboxyamide)-2'-deoxyuridine
  misc_feature (20)..(20): n is 5-(N-benzylcarboxyamide)-2'-deoxyuridine
  misc_feature (21)..(21): n is 2'-O-methyl-adenosine
  misc_feature (24)..(24): n is 2'-O-methyl-guanosine
nnncngnnacncgcgnnnanngcn

SEQ ID NO: 183 - DNA, 24 bp, Artificial Sequence
  Synthetic
  misc_feature (1)..(2): n is 5-(N-benzylcarboxyamide)-2'-deoxyuridine
  misc_feature (3)..(3): n is 2'-O-methyl-adenosine
  misc_feature (5)..(5): n is hexaethylene glycol
  misc_feature (7)..(7): n is 5-(N-benzylcarboxyamide)-2'-deoxyuridine
  misc_feature (8)..(8): n is 5-[N-(4-hydroxyphenyl-2-ethyl)carboxyamide]-2'-deoxyuridine
  misc_feature (11)..(11): n is 2'-O-methyl-adenosine
  misc_feature (16)..(18): n is 5-(N-benzylcarboxyamide)-2'-deoxyuridine
  misc_feature (20)..(20): n is 5-(N-benzylcarboxyamide)-2'-deoxyuridine
  misc_feature (21)..(21): n is 2'-O-methyl-adenosine
  misc_feature (24)..(24): n is 2'-O-methyl-guanosine
nnncngnnacncgcgnnnanngcn

SEQ ID NO: 184 - DNA, 24 bp, Artificial Sequence
  Synthetic
  misc_feature (1)..(2): n is 5-(N-benzylcarboxyamide)-2'-deoxyuridine
  misc_feature (3)..(3): n is 2'-O-methyl-adenosine
  misc_feature (5)..(5): n is hexaethylene glycol
  misc_feature (7)..(8): n is 5-(N-benzylcarboxyamide)-2'-deoxyuridine
  misc_feature (11)..(11): n is 2'-O-methyl-adenosine
  misc_feature (16)..(16): n is 5-[N-(4-hydroxyphenyl-2-ethyl)carboxyamide]-2'-deoxyuridine
  misc_feature (17)..(18): n is 5-(N-benzylcarboxyamide)-2'-deoxyuridine
  misc_feature (20)..(20): n is 5-(N-benzylcarboxyamide)-2'-deoxyuridine
  misc_feature (21)..(21): n is 2'-O-methyl-adenosine
  misc_feature (24)..(24): n is 2'-O-methyl-guanosine
nnncngnnacncgcgnnnanngcn

SEQ ID NO: 185 - DNA, 24 bp, Artificial Sequence
  Synthetic
  misc_feature (1)..(2): n is 5-(N-benzylcarboxyamide)-2'-deoxyuridine
  misc_feature (3)..(3): n is 2'-O-methyl-adenosine
  misc_feature (5)..(5): n is hexaethylene glycol
  misc_feature (7)..(8): n is 5-(N-benzylcarboxyamide)-2'-deoxyuridine
  misc_feature (11)..(11): n is 2'-O-methyl-adenosine
  misc_feature (16)..(16): n is 5-(N-benzylcarboxyamide)-2'-deoxyuridine
  misc_feature (17)..(17): n is 5-[N-(4-hydroxyphenyl-2-ethyl)carboxyamide]-2'-deoxyuridine
  misc_feature (18)..(18): n is 5-(N-benzylcarboxyamide)-2'-deoxyuridine
  misc_feature (20)..(20): n is 5-(N-benzylcarboxyamide)-2'-deoxyuridine
  misc_feature (21)..(21): n is 2'-O-methyl-adenosine
  misc_feature (24)..(24): n is 2'-O-methyl-guanosine
nnncngnnacncgcgnnnanngcn

SEQ ID NO: 186 - DNA, 24 bp, Artificial Sequence
  Synthetic
  misc_feature (1)..(2): n is 5-(N-benzylcarboxyamide)-2'-deoxyuridine
  misc_feature (3)..(3): n is 2'-O-methyl-adenosine
  misc_feature (5)..(5): n is hexaethylene glycol
  misc_feature (7)..(8): n is 5-(N-benzylcarboxyamide)-2'-deoxyuridine
  misc_feature (11)..(11): n is 2'-O-methyl-adenosine
  misc_feature (16)..(17): n is 5-(N-benzylcarboxyamide)-2'-deoxyuridine
  misc_feature (18)..(18): n is 5-[N-(4-hydroxyphenyl-2-ethyl)carboxyamide]-2'-deoxyuridine
  misc_feature (20)..(20): n is 5-(N-benzylcarboxyamide)-2'-deoxyuridine
  misc_feature (21)..(21): n is 2'-O-methyl-adenosine
  misc_feature (24)..(24): n is 2'-O-methyl-guanosine
nnncngnnacncgcgnnnanngcn

SEQ ID NO: 187 - DNA, 24 bp, Artificial Sequence
  Synthetic
  misc_feature (1)..(2): n is 5-(N-benzylcarboxyamide)-2'-deoxyuridine
  misc_feature (3)..(3): n is 2'-O-methyl-adenosine
  misc_feature (5)..(5): n is hexaethylene glycol
  misc_feature (7)..(8): n is 5-(N-benzylcarboxyamide)-2'-deoxyuridine
  misc_feature (11)..(11): n is 2'-O-methyl-adenosine
  misc_feature (16)..(18): n is 5-(N-benzylcarboxyamide)-2'-deoxyuridine
  misc_feature (20)..(20): n is 5-[N-(4-hydroxyphenyl-2-ethyl)carboxyamide]-2'-deoxyuridine
  misc_feature (21)..(21): n is 2'-O-methyl-adenosine
  misc_feature (24)..(24): n is 2'-O-methyl-guanosine
nnncngnnacncgcgnnnanngcn

SEQ ID NO: 188 - DNA, 24 bp, Artificial Sequence
  Synthetic
  misc_feature (1)..(1): n is 5-[N-(4-fluorobenzyl)carboxyamide]-2'-deoxyuridine
  misc_feature (2)..(2): n is 5-(N-benzylcarboxyamide)-2'-deoxyuridine
  misc_feature (3)..(3): n is 2'-O-methyl-adenosine
  misc_feature (5)..(5): n is hexaethylene glycol
  misc_feature (7)..(8): n is 5-(N-benzylcarboxyamide)-2'-deoxyuridine
  misc_feature (11)..(11): n is 2'-O-methyl-adenosine
  misc_feature (16)..(18): n is 5-(N-benzylcarboxyamide)-2'-deoxyuridine
  misc_feature (20)..(20): n is 5-(N-benzylcarboxyamide)-2'-deoxyuridine
  misc_feature (21)..(21): n is 2'-O-methyl-adenosine
  misc_feature (24)..(24): n is 2'-O-methyl-guanosine
nnncngnnacncgcgnnnanngcn

SEQ ID NO: 189 - DNA, 24 bp, Artificial Sequence
  Synthetic
  misc_feature (1)..(1): n is 5-(N-benzylcarboxyamide)-2'-deoxyuridine
  misc_feature (2)..(2): n is 5-[N-(4-fluorobenzyl)carboxyamide]-2'-deoxyuridine
  misc_feature (3)..(3): n is 2'-O-methyl-adenosine
  misc_feature (5)..(5): n is hexaethylene glycol
  misc_feature (7)..(8): n is 5-(N-benzylcarboxyamide)-2'-deoxyuridine
  misc_feature (11)..(11): n is 2'-O-methyl-adenosine
  misc_feature (16)..(18): n is 5-(N-benzylcarboxyamide)-2'-deoxyuridine
  misc_feature (20)..(20): n is 5-(N-benzylcarboxyamide)-2'-deoxyuridine
  misc_feature (21)..(21): n is 2'-O-methyl-adenosine
  misc_feature (24)..(24): n is 2'-O-methyl-guanosine
nnncngnnacncgcgnnnanngcn

SEQ ID NO: 190 - DNA, 24 bp, Artificial Sequence
  Synthetic
  misc_feature (1)..(2): n is 5-(N-benzylcarboxyamide)-2'-deoxyuridine
  misc_feature (3)..(3): n is 2'-O-methyl-adenosine
  misc_feature (5)..(5): n is hexaethylene glycol
  misc_feature (7)..(7): n is 5-[N-(4-fluorobenzyl)carboxyamide]-2'-deoxyuridine
  misc_feature (8)..(8): n is 5-(N-benzylcarboxyamide)-2'-deoxyuridine
  misc_feature (11)..(11): n is 2'-O-methyl-adenosine
  misc_feature (16)..(18): n is 5-(N-benzylcarboxyamide)-2'-deoxyuridine
  misc_feature (20)..(20): n is 5-(N-benzylcarboxyamide)-2'-deoxyuridine
  misc_feature (21)..(21): n is 2'-O-methyl-adenosine
  misc_feature (24)..(24): n is 2'-O-methyl-guanosine
nnncngnnacncgcgnnnanngcn

SEQ ID NO: 191 - DNA, 24 bp, Artificial Sequence
  Synthetic
  misc_feature (1)..(2): n is 5-(N-benzylcarboxyamide)-2'-deoxyuridine
  misc_feature (3)..(3): n is 2'-O-methyl-adenosine
  misc_feature (5)..(5): n is hexaethylene glycol
  misc_feature (7)..(7): n is 5-(N-benzylcarboxyamide)-2'-deoxyuridine
  misc_feature (8)..(8): n is 5-[N-(4-fluorobenzyl)carboxyamide]-2'-deoxyuridine
  misc_feature (11)..(11): n is 2'-O-methyl-adenosine
  misc_feature (16)..(18): n is 5-(N-benzylcarboxyamide)-2'-deoxyuridine
  misc_feature (20)..(20): n is 5-(N-benzylcarboxyamide)-2'-deoxyuridine
  misc_feature (21)..(21): n is 2'-O-methyl-adenosine
  misc_feature (24)..(24): n is 2'-O-methyl-guanosine
nnncngnnacncgcgnnnanngcn

SEQ ID NO: 192 - DNA, 24 bp, Artificial Sequence
  Synthetic
  misc_feature (1)..(2): n is 5-(N-benzylcarboxyamide)-2'-deoxyuridine
  misc_feature (3)..(3): n is 2'-O-methyl-adenosine
  misc_feature (5)..(5): n is hexaethylene glycol
  misc_feature (7)..(8): n is 5-(N-benzylcarboxyamide)-2'-deoxyuridine
  misc_feature (11)..(11): n is 2'-O-methyl-adenosine
  misc_feature (16)..(16): n is 5-[N-(4-fluorobenzyl)carboxyamide]-2'-deoxyuridine
  misc_feature (17)..(18): n is 5-(N-benzylcarboxyamide)-2'-deoxyuridine
  misc_feature (20)..(20): n is 5-(N-benzylcarboxyamide)-2'-deoxyuridine
  misc_feature (21)..(21): n is 2'-O-methyl-adenosine
  misc_feature (24)..(24): n is 2'-O-methyl-guanosine
nnncngnnacncgcgnnnanngcn

SEQ ID NO: 193 - DNA, 24 bp, Artificial Sequence
  Synthetic
  misc_feature (1)..(2): n is 5-(N-benzylcarboxyamide)-2'-deoxyuridine
  misc_feature (3)..(3): n is 2'-O-methyl-adenosine
  misc_feature (5)..(5): n is hexaethylene glycol
  misc_feature (7)..(8): n is 5-(N-benzylcarboxyamide)-2'-deoxyuridine
  misc_feature (11)..(11): n is 2'-O-methyl-adenosine
  misc_feature (16)..(16): n is 5-(N-benzylcarboxyamide)-2'-deoxyuridine
  misc_feature (17)..(17): n is 5-[N-(4-fluorobenzyl)carboxyamide]-2'-deoxyuridine
  misc_feature (18)..(18): n is 5-(N-benzylcarboxyamide)-2'-deoxyuridine
  misc_feature (20)..(20): n is 5-(N-benzylcarboxyamide)-2'-deoxyuridine
  misc_feature (21)..(21): n is 2'-O-methyl-adenosine
  misc_feature (24)..(24): n is 2'-O-methyl-guanosine
nnncngnnacncgcgnnnanngcn

SEQ ID NO: 194 - DNA, 24 bp, Artificial Sequence
  Synthetic
  misc_feature (1)..(2): n is 5-(N-benzylcarboxyamide)-2'-deoxyuridine
  misc_feature (3)..(3): n is 2'-O-methyl-adenosine
  misc_feature (5)..(5): n is hexaethylene glycol
  misc_feature (7)..(8): n is 5-(N-benzylcarboxyamide)-2'-deoxyuridine
  misc_feature (11)..(11): n is 2'-O-methyl-adenosine
  misc_feature (16)..(17): n is 5-(N-benzylcarboxyamide)-2'-deoxyuridine
  misc_feature (18)..(18): n is 5-[N-(4-fluorobenzyl)carboxyamide]-2'-deoxyuridine
  misc_feature (20)..(20): n is 5-(N-benzylcarboxyamide)-2'-deoxyuridine
  misc_feature (21)..(21): n is 2'-O-methyl-adenosine
  misc_feature (24)..(24): n is 2'-O-methyl-guanosine
nnncngnnacncgcgnnnanngcn

SEQ ID NO: 195 - DNA, 24 bp, Artificial Sequence
  Synthetic
  misc_feature (1)..(2): n is 5-(N-benzylcarboxyamide)-2'-deoxyuridine
  misc_feature (3)..(3): n is 2'-O-methyl-adenosine
  misc_feature (5)..(5): n is hexaethylene glycol
  misc_feature (7)..(8): n is 5-(N-benzylcarboxyamide)-2'-deoxyuridine
  misc_feature (11)..(11): n is 2'-O-methyl-adenosine
  misc_feature (16)..(18): n is 5-(N-benzylcarboxyamide)-2'-deoxyuridine
  misc_feature (20)..(20): n is 5-[N-(4-fluorobenzyl)carboxyamide]-2'-deoxyuridine
  misc_feature (21)..(21): n is 2'-O-methyl-adenosine
  misc_feature (24)..(24): n is 2'-O-methyl-guanosine
nnncngnnacncgcgnnnanngcn

SEQ ID NO: 196 - DNA, 24 bp, Artificial Sequence
  Synthetic
  misc_feature (1)..(2): n is 5-(N-benzylcarboxyamide)-2'-deoxyuridine
  misc_feature (3)..(3): n is 2'-O-methyl-adenosine
  misc_feature (4)..(4): n is 2'-fluoro-2'-deoxycytidine
  misc_feature (5)..(5): n is hexaethylene glycol
  misc_feature (7)..(8): n is 5-(N-benzylcarboxyamide)-2'-deoxyuridine
  misc_feature (11)..(11): n is 2'-O-methyl-adenosine
  misc_feature (16)..(18): n is 5-(N-benzylcarboxyamide)-2'-deoxyuridine
  misc_feature (20)..(20): n is 5-(N-benzylcarboxyamide)-2'-deoxyuridine
  misc_feature (21)..(21): n is 2'-O-methyl-adenosine
  misc_feature (24)..(24): n is 2'-O-methyl-guanosine
nnnnngnnacncgcgnnnanngcn

SEQ ID NO: 197 - DNA, 24 bp, Artificial Sequence
  Synthetic
  misc_feature (1)..(2): n is 5-(N-benzylcarboxyamide)-2'-deoxyuridine
  misc_feature (3)..(3): n is 2'-O-methyl-adenosine
  misc_feature (5)..(5): n is hexaethylene glycol
  misc_feature (7)..(8): n is 5-(N-benzylcarboxyamide)-2'-deoxyuridine
  misc_feature (10)..(10): n is 2'-fluoro-2'-deoxycytidine
  misc_feature (11)..(11): n is 2'-O-methyl-adenosine
  misc_feature (16)..(18): n is 5-(N-benzylcarboxyamide)-2'-deoxyuridine
  misc_feature (20)..(20): n is 5-(N-benzylcarboxyamide)-2'-deoxyuridine
  misc_feature (21)..(21): n is 2'-O-methyl-adenosine
  misc_feature (24)..(24): n is 2'-O-methyl-guanosine
nnncngnnanncgcgnnnanngcn

SEQ ID NO: 198 - DNA, 24 bp, Artificial Sequence
  Synthetic
  misc_feature (1)..(2): n is 5-(N-benzylcarboxyamide)-2'-deoxyuridine
  misc_feature (3)..(3): n is 2'-O-methyl-adenosine
  misc_feature (5)..(5): n is hexaethylene glycol
  misc_feature (7)..(8): n is 5-(N-benzylcarboxyamide)-2'-deoxyuridine
  misc_feature (11)..(11): n is 2'-O-methyl-adenosine
  misc_feature (12)..(12): n is 2'-fluoro-2'-deoxycytidine
  misc_feature (16)..(18): n is 5-(N-benzylcarboxyamide)-2'-deoxyuridine
  misc_feature (20)..(20): n is 5-(N-benzylcarboxyamide)-2'-deoxyuridine
  misc_feature (21)..(21): n is 2'-O-methyl-adenosine
  misc_feature (24)..(24): n is 2'-O-methyl-guanosine
nnncngnnacnngcgnnnanngcn

SEQ ID NO: 199 - DNA, 24 bp, Artificial Sequence
  Synthetic
  misc_feature (1)..(2): n is 5-(N-benzylcarboxyamide)-2'-deoxyuridine
  misc_feature (3)..(3): n is 2'-O-methyl-adenosine
  misc_feature (5)..(5): n is hexaethylene glycol
  misc_feature (7)..(8): n is 5-(N-benzylcarboxyamide)-2'-deoxyuridine
  misc_feature (11)..(11): n is 2'-O-methyl-adenosine
  misc_feature (14)..(14): n is 2'-fluoro-2'-deoxycytidine
  misc_feature (16)..(18): n is 5-(N-benzylcarboxyamide)-2'-deoxyuridine
  misc_feature (20)..(20): n is 5-(N-benzylcarboxyamide)-2'-deoxyuridine
  misc_feature (21)..(21): n is 2'-O-methyl-adenosine
  misc_feature (24)..(24): n is 2'-O-methyl-guanosine
nnncngnnacncgngnnnanngcn

SEQ ID NO: 200 - DNA, 24 bp, Artificial Sequence
  Synthetic
  misc_feature (1)..(2): n is 5-(N-benzylcarboxyamide)-2'-deoxyuridine
  misc_feature (3)..(3): n is 2'-O-methyl-adenosine
  misc_feature (5)..(5): n is hexaethylene glycol
  misc_feature (7)..(8): n is 5-(N-benzylcarboxyamide)-2'-deoxyuridine
  misc_feature (11)..(11): n is 2'-O-methyl-adenosine
  misc_feature (16)..(18): n is 5-(N-benzylcarboxyamide)-2'-deoxyuridine
  misc_feature (20)..(20): n is 5-(N-benzylcarboxyamide)-2'-deoxyuridine
  misc_feature (21)..(21): n is 2'-O-methyl-adenosine
  misc_feature (23)..(23): n is 2'-fluoro-2'-deoxycytidine
  misc_feature (24)..(24): n is 2'-O-methyl-guanosine
nnncngnnacncgcgnnnanngnn

SEQ ID NO: 201 - DNA, 24 bp, Artificial Sequence
  Synthetic
  misc_feature (1)..(2): n is 5-(N-benzylcarboxyamide)-2'-deoxyuridine
  misc_feature (3)..(3): n is 2'-O-methyl-adenosine
  misc_feature (5)..(5): n is hexaethylene glycol
  misc_feature (7)..(8): n is 5-(N-benzylcarboxyamide)-2'-deoxyuridine
  misc_feature (11)..(11): n is 2'-O-methyl-adenosine
  misc_feature (16)..(18): n is 5-(N-benzylcarboxyamide)-2'-deoxyuridine
  misc_feature (19)..(19): n is 2'-O-methyl-adenosine
  misc_feature (20)..(20): n is 5-(N-benzylcarboxyamide)-2'-deoxyuridine
  misc_feature (21)..(21): n is 2'-O-methyl-adenosine
  misc_feature (24)..(24): n is 2'-O-methyl-guanosine
nnncngnnacncgcgnnnnnngcn

SEQ ID NO: 202 - DNA, 24 bp, Artificial Sequence
  Synthetic
  misc_feature (1)..(2): n is 5-(N-benzylcarboxyamide)-2'-deoxyuridine
  misc_feature (3)..(3): n is 2'-O-methyl-adenosine
  misc_feature (5)..(5): n is hexaethylene glycol
  misc_feature (6)..(6): n is 2'-O-methyl-guanosine
  misc_feature (7)..(8): n is 5-(N-benzylcarboxyamide)-2'-deoxyuridine
  misc_feature (11)..(11): n is 2'-O-methyl-adenosine
  misc_feature (16)..(18): n is 5-(N-benzylcarboxyamide)-2'-deoxyuridine
  misc_feature (20)..(20): n is 5-(N-benzylcarboxyamide)-2'-deoxyuridine
  misc_feature (21)..(21): n is 2'-O-methyl-adenosine
  misc_feature (24)..(24): n is 2'-O-methyl-guanosine
nnncnnnnacncgcgnnnanngcn

SEQ ID NO: 203 - DNA, 24 bp, Artificial Sequence
  Synthetic
  misc_feature (1)..(2): n is 5-(N-benzylcarboxyamide)-2'-deoxyuridine
  misc_feature (3)..(3): n is 2'-O-methyl-adenosine
  misc_feature (5)..(5): n is hexaethylene glycol
  misc_feature (7)..(8): n is 5-(N-benzylcarboxyamide)-2'-deoxyuridine
  misc_feature (11)..(11): n is 2'-O-methyl-adenosine
  misc_feature (13)..(13): n is 2'-O-methyl-guanosine
  misc_feature (16)..(18): n is 5-(N-benzylcarboxyamide)-2'-deoxyuridine
  misc_feature (20)..(20): n is 5-(N-benzylcarboxyamide)-2'-deoxyuridine
  misc_feature (21)..(21): n is 2'-O-methyl-adenosine
  misc_feature (24)..(24): n is 2'-O-methyl-guanosine
nnncngnnacncncgnnnanngcn

SEQ ID NO: 204 - DNA, 24 bp, Artificial Sequence
  Synthetic
  misc_feature (1)..(2): n is 5-(N-benzylcarboxyamide)-2'-deoxyuridine
  misc_feature (3)..(3): n is 2'-O-methyl-adenosine
  misc_feature (5)..(5): n is hexaethylene glycol
  misc_feature (7)..(8): n is 5-(N-benzylcarboxyamide)-2'-deoxyuridine
  misc_feature (11)..(11): n is 2'-O-methyl-adenosine
  misc_feature (15)..(15): n is 2'-O-methyl-guanosine
  misc_feature (16)..(18): n is 5-(N-benzylcarboxyamide)-2'-deoxyuridine
  misc_feature (20)..(20): n is 5-(N-benzylcarboxyamide)-2'-deoxyuridine
  misc_feature (21)..(21): n is 2'-O-methyl-adenosine
  misc_feature (24)..(24): n is 2'-O-methyl-guanosine
nnncngnnacncgcnnnnanngcn

SEQ ID NO: 205 - DNA, 24 bp, Artificial Sequence
  Synthetic
  misc_feature (1)..(2): n is 5-(N-benzylcarboxyamide)-2'-deoxyuridine
  misc_feature (3)..(3): n is 2'-O-methyl-adenosine
  misc_feature (5)..(5): n is hexaethylene glycol
  misc_feature (7)..(8): n is 5-(N-benzylcarboxyamide)-2'-deoxyuridine
  misc_feature (11)..(11): n is 2'-O-methyl-adenosine
  misc_feature (16)..(18): n is 5-(N-benzylcarboxyamide)-2'-deoxyuridine
  misc_feature (20)..(20): n is 5-(N-benzylcarboxyamide)-2'-deoxyuridine
  misc_feature (21)..(21): n is 2'-O-methyl-adenosine
  misc_feature (22)..(22): n is 2'-O-methyl-guanosine
  misc_feature (24)..(24): n is 2'-O-methyl-guanosine
nnncngnnacncgcgnnnannncn

SEQ ID NO: 206 - DNA, 24 bp, Artificial Sequence
  Synthetic
  misc_feature (1)..(1): n is 5-[N-(4-hydroxyphenyl-2-ethyl)carboxyamide]-2'-deoxyuridine
  misc_feature (2)..(2): n is 5-(N-benzylcarboxyamide)-2'-deoxyuridine
  misc_feature (3)..(3): n is 2'-O-methyl-adenosine
  misc_feature (5)..(5): n is hexaethylene glycol
  misc_feature (7)..(7): n is 5-[N-(4-fluorobenzyl)carboxyamide]-2'-deoxyuridine
  misc_feature (8)..(8): n is 5-(N-benzylcarboxyamide)-2'-deoxyuridine
  misc_feature (11)..(11): n is 2'-O-methyl-adenosine
  misc_feature (16)..(16): n is 5-[N-(2-naphthylmethyl)carboxyamide]-2'-deoxyuridine
  misc_feature (17)..(18): n is 5-(N-benzylcarboxyamide)-2'-deoxyuridine
  misc_feature (20)..(20): n is 5-(N-benzylcarboxyamide)-2'-deoxyuridine
  misc_feature (21)..(21): n is 2'-O-methyl-adenosine
  misc_feature (24)..(24): n is 2'-O-methyl-guanosine
nnncngnnacncgcgnnnanngcn

SEQ ID NO: 207 - DNA, 24 bp, Artificial Sequence
  Synthetic
  misc_feature (1)..(2): n is 5-(N-benzylcarboxyamide)-2'-deoxyuridine
  misc_feature (3)..(3): n is 2'-O-methyl-adenosine
  misc_feature (5)..(5): n is hexaethylene glycol
  misc_feature (7)..(7): n is 5-(N-benzylcarboxyamide)-2'-deoxyuridine
  misc_feature (8)..(8): n is 5-[N-isobutyl-carboxyamide]-2'-deoxyuridine
  misc_feature (11)..(11): n is 2'-O-methyl-adenosine
  misc_feature (16)..(16): n is 5-(N-benzylcarboxyamide)-2'-deoxyuridine
  misc_feature (17)..(17): n is 5-[N-(phenyl-2-ethyl)-carboxyamide]-2'-deoxyuridine
  misc_feature (18)..(18): n is 5-[N-(2-thiophene-methyl)carboxyamide]-2'-deoxyuridine
  misc_feature (20)..(20): n is 5-(N-benzylcarboxyamide)-2'-deoxyuridine
  misc_feature (21)..(21): n is 2'-O-methyl-adenosine
  misc_feature (24)..(24): n is 2'-O-methyl-guanosine
nnncngnnacncgcgnnnanngcn

SEQ ID NO: 208 - DNA, 24 bp, Artificial Sequence
  Synthetic
  misc_feature (1)..(2): n is 5-(N-benzylcarboxyamide)-2'-deoxyuridine
  misc_feature (3)..(3): n is 2'-O-methyl-adenosine
  misc_feature (5)..(5): n is hexaethylene glycol
  misc_feature (7)..(7): n is 5-[N-(2-naphthylmethyl)carboxyamide]-2'-deoxyuridine
  misc_feature (8)..(8): n is 5-[N-isobutyl-carboxyamide]-2'-deoxyuridine
  misc_feature (11)..(11): n is 2'-O-methyl-adenosine
  misc_feature (16)..(18): n is 5-(N-benzylcarboxyamide)-2'-deoxyuridine
  misc_feature (20)..(20): n is 5-(N-benzylcarboxyamide)-2'-deoxyuridine
  misc_feature (21)..(21): n is 2'-O-methyl-adenosine
  misc_feature (24)..(24): n is 2'-O-methyl-guanosine
nnncngnnacncgcgnnnanngcn

SEQ ID NO: 209 - DNA, 24 bp, Artificial Sequence
  Synthetic
  misc_feature (1)..(2): n is 5-(N-benzylcarboxyamide)-2'-deoxyuridine
  misc_feature (3)..(3): n is 2'-O-methyl-adenosine
  misc_feature (5)..(5): n is hexaethylene glycol
  misc_feature (7)..(7): n is 5-[N-(1-naphthyl-2-ethyl)carboxyamide]-2'-deoxyuridine
  misc_feature (8)..(8): n is 5-[N-isobutyl-carboxyamide]-2'-deoxyuridine
  misc_feature (11)..(11): n is 2'-O-methyl-adenosine
  misc_feature (16)..(18): n is 5-(N-benzylcarboxyamide)-2'-deoxyuridine
  misc_feature (20)..(20): n is 5-(N-benzylcarboxyamide)-2'-deoxyuridine
  misc_feature (21)..(21): n is 2'-O-methyl-adenosine
  misc_feature (24)..(24): n is 2'-O-methyl-guanosine
nnncngnnacncgcgnnnanngcn

SEQ ID NO: 210 - DNA, 24 bp, Artificial Sequence
  Synthetic
  misc_feature (1)..(2): n is 5-(N-benzylcarboxyamide)-2'-deoxyuridine
  misc_feature (3)..(3): n is 2'-O-methyl-adenosine
  misc_feature (5)..(5): n is hexaethylene glycol
  misc_feature (7)..(8): n is 5-[N-isobutyl-carboxyamide]-2'-deoxyuridine
  misc_feature (11)..(11): n is 2'-O-methyl-adenosine
  misc_feature (16)..(18): n is 5-(N-benzylcarboxyamide)-2'-deoxyuridine
  misc_feature (20)..(20): n is 5-(N-benzylcarboxyamide)-2'-deoxyuridine
  misc_feature (21)..(21): n is 2'-O-methyl-adenosine
  misc_feature (24)..(24): n is 2'-O-methyl-guanosine
nnncngnnacncgcgnnnanngcn

SEQ ID NO: 211 - DNA, 24 bp, Artificial Sequence
  Synthetic
  misc_feature (1)..(2): n is 5-(N-benzylcarboxyamide)-2'-deoxyuridine
  misc_feature (3)..(3): n is 2'-O-methyl-adenosine
  misc_feature (5)..(5): n is hexaethylene glycol
  misc_feature (7)..(8): n is 5-(N-benzylcarboxyamide)-2'-deoxyuridine
  misc_feature (11)..(11): n is 2'-O-methyl-adenosine
  misc_feature (16)..(16): n is 5-(N-benzylcarboxyamide)-2'-deoxyuridine
  misc_feature (17)..(17): n is 5-[N-(phenyl-2-ethyl)-carboxyamide]-2'-deoxyuridine
  misc_feature (18)..(18): n is 5-[N-(2-thiophene-methyl)carboxyamide]-2'-deoxyuridine
  misc_feature (20)..(20): n is 5-(N-benzylcarboxyamide)-2'-deoxyuridine
  misc_feature (21)..(21): n is 2'-O-methyl-adenosine
  misc_feature (24)..(24): n is 2'-O-methyl-guanosine
nnncngnnacncgcgnnnanngcn

SEQ ID NO: 212 - DNA, 24 bp, Artificial Sequence
  Synthetic
  misc_feature (1)..(2): n is 5-(N-benzylcarboxyamide)-2'-deoxyuridine
  misc_feature (3)..(3): n is 2'-O-methyl-adenosine
  misc_feature (5)..(5): n is hexaethylene glycol
  misc_feature (7)..(8): n is 5-(N-benzylcarboxyamide)-2'-deoxyuridine
  misc_feature (11)..(11): n is 2'-O-methyl-adenosine
  misc_feature (16)..(16): n is 5-(N-benzylcarboxyamide)-2'-deoxyuridine
  misc_feature (17)..(18): n is 5-[N-(phenyl-2-ethyl)-carboxyamide]-2'-deoxyuridine
  misc_feature (20)..(20): n is 5-(N-benzylcarboxyamide)-2'-deoxyuridine
  misc_feature (21)..(21): n is 2'-O-methyl-adenosine
  misc_feature (24)..(24): n is 2'-O-methyl-guanosine
nnncngnnacncgcgnnnanngcn

SEQ ID NO: 213 - DNA, 24 bp, Artificial Sequence
  Synthetic
  misc_feature (1)..(2): n is 5-(N-benzylcarboxyamide)-2'-deoxyuridine
  misc_feature (3)..(3): n is 2'-O-methyl-adenosine
  misc_feature (5)..(5): n is hexaethylene glycol
  misc_feature (7)..(8): n is 5-(N-benzylcarboxyamide)-2'-deoxyuridine
  misc_feature (11)..(11): n is 2'-O-methyl-adenosine
  misc_feature (16)..(16): n is 5-(N-benzylcarboxyamide)-2'-deoxyuridine
  misc_feature (17)..(18): n is 5-[N-(2-thiophene-methyl)carboxyamide]-2'-deoxyuridine
  misc_feature (20)..(20): n is 5-(N-benzylcarboxyamide)-2'-deoxyuridine
  misc_feature (21)..(21): n is 2'-O-methyl-adenosine
  misc_feature (24)..(24): n is 2'-O-methyl-guanosine
nnncngnnacncgcgnnnanngcn

SEQ ID NO: 214 - DNA, 24 bp, Artificial Sequence
  Synthetic
  misc_feature (1)..(2): n is 5-(N-benzylcarboxyamide)-2'-deoxyuridine
  misc_feature (3)..(3): n is 2'-O-methyl-adenosine
  misc_feature (5)..(5): n is hexaethylene glycol
  misc_feature (7)..(8): n is 5-(N-benzylcarboxyamide)-2'-deoxyuridine
  misc_feature (11)..(11): n is 2'-O-methyl-adenosine
  misc_feature (16)..(16): n is 5-[N-(2-naphthylmethyl)carboxyamide]-2'-deoxyuridine
  misc_feature (17)..(17): n is 5-[N-(phenyl-2-ethyl)-carboxyamide]-2'-deoxyuridine
  misc_feature (18)..(18): n is 5-[N-(2-thiophene-methyl)carboxyamide]-2'-deoxyuridine
  misc_feature (20)..(20): n is 5-(N-benzylcarboxyamide)-2'-deoxyuridine
  misc_feature (21)..(21): n is 2'-O-methyl-adenosine
  misc_feature (24)..(24): n is 2'-O-methyl-guanosine
nnncngnnacncgcgnnnanngcn

SEQ ID NO: 215 - DNA, 24 bp, Artificial Sequence
  Synthetic
  misc_feature (1)..(2): n is 5-(N-benzylcarboxyamide)-2'-deoxyuridine
  misc_feature (3)..(3): n is 2'-O-methyl-adenosine
  misc_feature (5)..(5): n is hexaethylene glycol
  misc_feature (7)..(8): n is 5-(N-benzylcarboxyamide)-2'-deoxyuridine
  misc_feature (11)..(11): n is 2'-O-methyl-adenosine
  misc_feature (16)..(16): n is 5-[N-(2-thiophene-methyl)carboxyamide]-2'-deoxyuridine
  misc_feature (17)..(17): n is 5-[N-(phenyl-2-ethyl)-carboxyamide]-2'-deoxyuridine
  misc_feature (18)..(18): n is 5-[N-(2-thiophene-methyl)carboxyamide]-2'-deoxyuridine
  misc_feature (20)..(20): n is 5-(N-benzylcarboxyamide)-2'-deoxyuridine
  misc_feature (21)..(21): n is 2'-O-methyl-adenosine
  misc_feature (24)..(24): n is 2'-O-methyl-guanosine
nnncngnnacncgcgnnnanngcn

SEQ ID NO: 216 - DNA, 24 bp, Artificial Sequence
  Synthetic
  misc_feature (1)..(2): n is 5-(N-benzylcarboxyamide)-2'-deoxyuridine
  misc_feature (3)..(3): n is 2'-O-methyl-adenosine
  misc_feature (5)..(5): n is hexaethylene glycol
  misc_feature (7)..(8): n is 5-(N-benzylcarboxyamide)-2'-deoxyuridine
  misc_feature (11)..(11): n is 2'-O-methyl-adenosine
  misc_feature (16)..(16): n is 5-[N-isobutyl-carboxyamide]-2'-deoxyuridine
  misc_feature (17)..(17): n is 5-[N-(phenyl-2-ethyl)-carboxyamide]-2'-deoxyuridine
  misc_feature (18)..(18): n is 5-[N-(2-thiophene-methyl)carboxyamide]-2'-deoxyuridine
  misc_feature (20)..(20): n is 5-(N-benzylcarboxyamide)-2'-deoxyuridine
  misc_feature (21)..(21): n is 2'-O-methyl-adenosine
  misc_feature (24)..(24): n is 2'-O-methyl-guanosine
nnncngnnacncgcgnnnanngcn

SEQ ID NO: 217 - DNA, 24 bp, Artificial Sequence
  Synthetic
  misc_feature (1)..(2): n is 5-(N-benzylcarboxyamide)-2'-deoxyuridine
  misc_feature (3)..(3): n is 2'-O-methyl-adenosine
  misc_feature (5)..(5): n is hexaethylene glycol
  misc_feature (7)..(7): n is 5-(N-benzylcarboxyamide)-2'-deoxyuridine
  misc_feature (8)..(8): n is 5-[N-isobutyl-carboxyamide]-2'-deoxyuridine
  misc_feature (11)..(11): n is 2'-O-methyl-adenosine
  misc_feature (16)..(16): n is 5-[N-(2-thiophene-methyl)carboxyamide]-2'-deoxyuridine
  misc_feature (17)..(17): n is 5-[N-(phenyl-2-ethyl)-carboxyamide]-2'-deoxyuridine
  misc_feature (18)..(18): n is 5-[N-(2-thiophene-methyl)carboxyamide]-2'-deoxyuridine
  misc_feature (20)..(20): n is 5-(N-benzylcarboxyamide)-2'-deoxyuridine
  misc_feature (21)..(21): n is 2'-O-methyl-adenosine
  misc_feature (24)..(24): n is 2'-O-methyl-guanosine
nnncngnnacncgcgnnnanngcn

SEQ ID NO: 218 - DNA, 24 bp, Artificial Sequence
  Synthetic
  misc_feature (1)..(1): n is 5-(N-benzylcarboxyamide)-2'-deoxyuridine
  misc_feature (2)..(2): n is 5-[N-isobutyl-carboxyamide]-2'-deoxyuridine
  misc_feature (3)..(3): n is 2'-O-methyl-adenosine
  misc_feature (5)..(5): n is hexaethylene glycol
  misc_feature (7)..(8): n is 5-[N-isobutyl-carboxyamide]-2'-deoxyuridine
  misc_feature (11)..(11): n is 2'-O-methyl-adenosine
  misc_feature (16)..(16): n is 5-[N-isobutyl-carboxyamide]-2'-deoxyuridine
  misc_feature (17)..(18): n is 5-(N-benzylcarboxyamide)-2'-deoxyuridine
  misc_feature (20)..(20): n is 5-(N-benzylcarboxyamide)-2'-deoxyuridine
  misc_feature (21)..(21): n is 2'-O-methyl-adenosine
  misc_feature (24)..(24): n is 2'-O-methyl-guanosine
nnncngnnacncgcgnnnanngcn

SEQ ID NO: 219 - DNA, 24 bp, Artificial Sequence
  Synthetic
  misc_feature (1)..(2): n is 5-[N-(2-naphthylmethyl)carboxyamide]-2'-deoxyuridine
  misc_feature (3)..(3): n is 2'-O-methyl-adenosine
  misc_feature (5)..(5): n is hexaethylene glycol
  misc_feature (7)..(7): n is 5-[N-(2-naphthylmethyl)carboxyamide]-2'-deoxyuridine
  misc_feature (8)..(8): n is 5-(N-benzylcarboxyamide)-2'-deoxyuridine
  misc_feature (11)..(11): n is 2'-O-methyl-adenosine
  misc_feature (16)..(16): n is 5-[N-(2-naphthylmethyl)carboxyamide]-2'-deoxyuridine
  misc_feature (17)..(18): n is 5-(N-benzylcarboxyamide)-2'-deoxyuridine
  misc_feature (20)..(20): n is 5-(N-benzylcarboxyamide)-2'-deoxyuridine
  misc_feature (21)..(21): n is 2'-O-methyl-adenosine
  misc_feature (24)..(24): n is 2'-O-methyl-guanosine
nnncngnnacncgcgnnnanngcn

SEQ ID NO: 220 - DNA, 24 bp, Artificial Sequence
  Synthetic
  misc_feature (1)..(1): n is 5-[N-(1-naphthyl-2-ethyl)carboxyamide]-2'-deoxyuridine
  misc_feature (2)..(2): n is 5-(N-benzylcarboxyamide)-2'-deoxyuridine
  misc_feature (3)..(3): n is 2'-O-methyl-adenosine
  misc_feature (5)..(5): n is hexaethylene glycol
  misc_feature (7)..(7): n is 5-[N-(1-naphthyl-2-ethyl)carboxyamide]-2'-deoxyuridine
  misc_feature (8)..(8): n is 5-(N-benzylcarboxyamide)-2'-deoxyuridine
  misc_feature (11)..(11): n is 2'-O-methyl-adenosine
  misc_feature (16)..(18): n is 5-(N-benzylcarboxyamide)-2'-deoxyuridine
  misc_feature (20)..(20): n is 5-[N-(1-naphthyl-2-ethyl)carboxyamide]-2'-deoxyuridine
  misc_feature (21)..(21): n is 2'-O-methyl-adenosine
  misc_feature (24)..(24): n is 2'-O-methyl-guanosine
nnncngnnacncgcgnnnanngcn

SEQ ID NO: 221 - DNA, 24 bp, Artificial Sequence
  Synthetic
  misc_feature (1)..(1): n is 5-[N-(2-thiophene-methyl)carboxyamide]-2'-deoxyuridine
  misc_feature (2)..(2): n is 5-(N-benzylcarboxyamide)-2'-deoxyuridine
  misc_feature (3)..(3): n is 2'-O-methyl-adenosine
  misc_feature (5)..(5): n is hexaethylene glycol
  misc_feature (7)..(8): n is 5-(N-benzylcarboxyamide)-2'-deoxyuridine
  misc_feature (11)..(11): n is 2'-O-methyl-adenosine
  misc_feature (16)..(16): n is 5-[N-(2-thiophene-methyl)carboxyamide]-2'-deoxyuridine
  misc_feature (17)..(17): n is 5-(N-benzylcarboxyamide)-2'-deoxyuridine
  misc_feature (18)..(18): n is 5-[N-(2-thiophene-methyl)carboxyamide]-2'-deoxyuridine
  misc_feature (20)..(20): n is 5-(N-benzylcarboxyamide)-2'-deoxyuridine
  misc_feature (21)..(21): n is 2'-O-methyl-adenosine
  misc_feature (24)..(24): n is 2'-O-methyl-guanosine
nnncngnnacncgcgnnnanngcn

SEQ ID NO: 222 - DNA, 24 bp, Artificial Sequence
  Synthetic
  misc_feature (1)..(2): n is 5-(N-benzylcarboxyamide)-2'-deoxyuridine
  misc_feature (3)..(3): n is 2'-O-methyl-adenosine
  misc_feature (5)..(5): n is hexaethylene glycol
  misc_feature (7)..(8): n is 5-(N-benzylcarboxyamide)-2'-deoxyuridine
  misc_feature (11)..(11): n is 2'-O-methyl-adenosine
  misc_feature (12)..(12): n is 2'-O-methyl-cytidine
  misc_feature (16)..(18): n is 5-(N-benzylcarboxyamide)-2'-deoxyuridine
  misc_feature (19)..(19): n is 2'-O-methyl-adenosine
  misc_feature (20)..(20): n is 5-(N-benzylcarboxyamide)-2'-deoxyuridine
  misc_feature (21)..(21): n is 2'-O-methyl-adenosine
  misc_feature (22)..(22): n is 2'-O-methyl-guanosine
  misc_feature (24)..(24): n is 2'-O-methyl-guanosine
nnncngnnacnngcgnnnnnnncn

SEQ ID NO: 223 - DNA, 24 bp, Artificial Sequence
  Synthetic
  misc_feature (1)..(2): n is 5-(N-benzylcarboxyamide)-2'-deoxyuridine
  misc_feature (3)..(3): n is 2'-O-methyl-adenosine
  misc_feature (5)..(5): n is hexaethylene glycol
  misc_feature (7)..(8): n is 5-(N-benzylcarboxyamide)-2'-deoxyuridine
  misc_feature (11)..(11): n is 2'-O-methyl-adenosine
  misc_feature (16)..(18): n is 5-(N-benzylcarboxyamide)-2'-deoxyuridine
  misc_feature (19)..(19): n is 2'-O-methyl-adenosine
  misc_feature (20)..(20): n is 5-(N-benzylcarboxyamide)-2'-deoxyuridine
  misc_feature (21)..(21): n is 2'-O-methyl-adenosine
  misc_feature (22)..(22): n is 2'-O-methyl-guanosine
  misc_feature (24)..(24): n is 2'-O-methyl-guanosine
nnncngnnacncgcgnnnnnnncn

SEQ ID NO: 224 - DNA, 24 bp, Artificial Sequence
  Synthetic
  misc_feature (1)..(2): n is 5-(N-benzylcarboxyamide)-2'-deoxyuridine
  misc_feature (3)..(3): n is 2'-O-methyl-adenosine
  misc_feature (5)..(5): n is hexaethylene glycol
  misc_feature (7)..(8): n is 5-(N-benzylcarboxyamide)-2'-deoxyuridine
  misc_feature (11)..(11): n is 2'-O-methyl-adenosine
  misc_feature (12)..(12): n is 2'-O-methyl-cytidine
  misc_feature (16)..(18): n is 5-(N-benzylcarboxyamide)-2'-deoxyuridine
  misc_feature (19)..(19): n is 2'-O-methyl-adenosine
  misc_feature (20)..(20): n is 5-(N-benzylcarboxyamide)-2'-deoxyuridine
  misc_feature (21)..(21): n is 2'-O-methyl-adenosine
  misc_feature (24)..(24): n is 2'-O-methyl-guanosine
nnncngnnacnngcgnnnnnngcn

SEQ ID NO: 225 - DNA, 24 bp, Artificial Sequence
  Synthetic
  misc_feature (1)..(2): n is 5-(N-benzylcarboxyamide)-2'-deoxyuridine
  misc_feature (3)..(3): n is 2'-O-methyl-adenosine
  misc_feature (5)..(5): n is hexaethylene glycol
  misc_feature (7)..(8): n is 5-(N-benzylcarboxyamide)-2'-deoxyuridine
  misc_feature (11)..(11): n is 2'-O-methyl-adenosine
  misc_feature (12)..(12): n is 2'-O-methyl-cytidine
  misc_feature (16)..(18): n is 5-(N-benzylcarboxyamide)-2'-deoxyuridine
  misc_feature (20)..(20): n is 5-(N-benzylcarboxyamide)-2'-deoxyuridine
  misc_feature (21)..(21): n is 2'-O-methyl-adenosine
  misc_feature (22)..(22): n is 2'-O-methyl-guanosine
  misc_feature (24)..(24): n is 2'-O-methyl-guanosine
nnncngnnacnngcgnnnannncn

SEQ ID NO: 226 - DNA, 24 bp, Artificial Sequence
  Synthetic
  misc_feature (1)..(2): n is 5-(N-benzylcarboxyamide)-2'-deoxyuridine
  misc_feature (3)..(3): n is 2'-O-methyl-adenosine
  misc_feature (5)..(5): n is hexaethylene glycol
  misc_feature (7)..(7): n is 5-(N-benzylcarboxyamide)-2'-deoxyuridine
  misc_feature (8)..(8): n is 5-[N-isobutyl-carboxyamide]-2'-deoxyuridine
  misc_feature (11)..(11): n is 2'-O-methyl-adenosine
  misc_feature (16)..(16): n is 5-[N-(2-naphthylmethyl)carboxyamide]-2'-deoxyuridine
  misc_feature (17)..(17): n is 5-[N-(phenyl-2-ethyl)-carboxyamide]-2'-deoxyuridine
  misc_feature (18)..(18): n is 5-[N-(2-thiophene-methyl)carboxyamide]-2'-deoxyuridine
  misc_feature (20)..(20): n is 5-(N-benzylcarboxyamide)-2'-deoxyuridine
  misc_feature (21)..(21): n is 2'-O-methyl-adenosine
  misc_feature (24)..(24): n is 2'-O-methyl-guanosine
nnncngnnacncgcgnnnanngcn

SEQ ID NO: 227 - DNA, 24 bp, Artificial Sequence
  Synthetic
  misc_feature (1)..(2): n is 5-(N-benzylcarboxyamide)-2'-deoxyuridine
  misc_feature (3)..(3): n is 2'-O-methyl-adenosine
  misc_feature (5)..(5): n is hexaethylene glycol
  misc_feature (7)..(7): n is 5-(N-benzylcarboxyamide)-2'-deoxyuridine
  misc_feature (8)..(8): n is 5-[N-isobutyl-carboxyamide]-2'-deoxyuridine
  misc_feature (11)..(11): n is 2'-O-methyl-adenosine
  misc_feature (12)..(12): n is 2'-O-methyl-cytidine
  misc_feature (16)..(16): n is 5-(N-benzylcarboxyamide)-2'-deoxyuridine
  misc_feature (17)..(17): n is 5-[N-(phenyl-2-ethyl)-carboxyamide]-2'-deoxyuridine
  misc_feature (18)..(18): n is 5-[N-(2-thiophene-methyl)carboxyamide]-2'-deoxyuridine
  misc_feature (20)..(20): n is 5-(N-benzylcarboxyamide)-2'-deoxyuridine
  misc_feature (21)..(21): n is 2'-O-methyl-adenosine
  misc_feature (24)..(24): n is 2'-O-methyl-guanosine
nnncngnnacnngcgnnnanngcn

SEQ ID NO: 228 - DNA, 24 bp, Artificial Sequence
  Synthetic
  misc_feature (1)..(2): n is 5-(N-benzylcarboxyamide)-2'-deoxyuridine
  misc_feature (3)..(3): n is 2'-O-methyl-adenosine
  misc_feature (5)..(5): n is hexaethylene glycol
  misc_feature (7)..(7): n is 5-(N-benzylcarboxyamide)-2'-deoxyuridine
  misc_feature (8)..(8): n is 5-[N-isobutyl-carboxyamide]-2'-deoxyuridine
  misc_feature (11)..(11): n is 2'-O-methyl-adenosine
  misc_feature (16)..(16): n is 5-(N-benzylcarboxyamide)-2'-deoxyuridine
  misc_feature (17)..(17): n is 5-[N-(phenyl-2-ethyl)-carboxyamide]-2'-deoxyuridine
  misc_feature (18)..(18): n is 5-[N-(2-thiophene-methyl)carboxyamide]-2'-deoxyuridine
  misc_feature (19)..(19): n is 2'-O-methyl-adenosine
  misc_feature (20)..(20): n is 5-(N-benzylcarboxyamide)-2'-deoxyuridine
  misc_feature (21)..(21): n is 2'-O-methyl-adenosine
  misc_feature (24)..(24): n is 2'-O-methyl-guanosine
nnncngnnacncgcgnnnnnngcn

SEQ ID NO: 229 - DNA, 24 bp, Artificial Sequence
  Synthetic
  misc_feature (1)..(2): n is 5-(N-benzylcarboxyamide)-2'-deoxyuridine
  misc_feature (3)..(3): n is 2'-O-methyl-adenosine
  misc_feature (5)..(5): n is hexaethylene glycol
  misc_feature (7)..(7): n is 5-(N-benzylcarboxyamide)-2'-deoxyuridine
  misc_feature (8)..(8): n is 5-[N-isobutyl-carboxyamide]-2'-deoxyuridine
  misc_feature (11)..(11): n is 2'-O-methyl-adenosine
  misc_feature (16)..(16): n is 5-(N-benzylcarboxyamide)-2'-deoxyuridine
  misc_feature (17)..(17): n is 5-[N-(phenyl-2-ethyl)-carboxyamide]-2'-deoxyuridine
  misc_feature (18)..(18): n is 5-[N-(2-thiophene-methyl)carboxyamide]-2'-deoxyuridine
  misc_feature (20)..(20): n is 5-(N-benzylcarboxyamide)-2'-deoxyuridine
  misc_feature (21)..(21): n is 2'-O-methyl-adenosine
  misc_feature (22)..(22): n is 2'-O-methyl-guanosine
  misc_feature (24)..(24): n is 2'-O-methyl-guanosine
nnncngnnacncgcgnnnannncn

SEQ ID NO: 230 - DNA, 24 bp, Artificial Sequence
  Synthetic
  misc_feature (1)..(2): n is 5-(N-benzylcarboxyamide)-2'-deoxyuridine
  misc_feature (3)..(3): n is 2'-O-methyl-adenosine
  misc_feature (5)..(5): n is hexaethylene glycol
  misc_feature (7)..(7): n is 5-(N-benzylcarboxyamide)-2'-deoxyuridine
  misc_feature (8)..(8): n is 5-[N-isobutyl-carboxyamide]-2'-deoxyuridine
  misc_feature (11)..(11): n is 2'-O-methyl-adenosine
  misc_feature (12)..(12): n is 2'-O-methyl-cytidine
  misc_feature (16)..(16): n is 5-(N-benzylcarboxyamide)-2'-deoxyuridine
  misc_feature (17)..(17): n is 5-[N-(phenyl-2-ethyl)-carboxyamide]-2'-deoxyuridine
  misc_feature (18)..(18): n is 5-[N-(2-thiophene-methyl)carboxyamide]-2'-deoxyuridine
  misc_feature (19)..(19): n is 2'-O-methyl-adenosine
  misc_feature (20)..(20): n is 5-(N-benzylcarboxyamide)-2'-deoxyuridine
  misc_feature (21)..(21): n is 2'-O-methyl-adenosine
  misc_feature (24)..(24): n is 2'-O-methyl-guanosine
nnncngnnacnngcgnnnnnngcn

SEQ ID NO: 231 - DNA, 24 bp, Artificial Sequence
  Synthetic
  misc_feature (1)..(2): n is 5-(N-benzylcarboxyamide)-2'-deoxyuridine
  misc_feature (3)..(3): n is 2'-O-methyl-adenosine
  misc_feature (5)..(5): n is hexaethylene glycol
  misc_feature (7)..(7): n is 5-(N-benzylcarboxyamide)-2'-deoxyuridine
  misc_feature (8)..(8): n is 5-[N-isobutyl-carboxyamide]-2'-deoxyuridine
  misc_feature (11)..(11): n is 2'-O-methyl-adenosine
  misc_feature (12)..(12): n is 2'-O-methyl-cytidine
  misc_feature (16)..(16): n is 5-(N-benzylcarboxyamide)-2'-deoxyuridine
  misc_feature (17)..(17): n is 5-[N-(phenyl-2-ethyl)-carboxyamide]-2'-deoxyuridine
  misc_feature (18)..(18): n is 5-[N-(2-thiophene-methyl)carboxyamide]-2'-deoxyuridine
  misc_feature (19)..(19): n is 2'-O-methyl-adenosine
  misc_feature (20)..(20): n is 5-(N-benzylcarboxyamide)-2'-deoxyuridine
  misc_feature (21)..(21): n is 2'-O-methyl-adenosine
  misc_feature (22)..(22): n is 2'-O-methyl-guanosine
  misc_feature (24)..(24): n is 2'-O-methyl-guanosine
nnncngnnacnngcgnnnnnnncn

SEQ ID NO: 232 - DNA, 24 bp, Artificial Sequence
  Synthetic
  misc_feature (1)..(2): n is 5-(N-benzylcarboxyamide)-2'-deoxyuridine
  misc_feature (3)..(3): n is 2'-O-methyl-adenosine
  misc_feature (5)..(5): n is hexaethylene glycol
  misc_feature (7)..(8): n is 5-(N-benzylcarboxyamide)-2'-deoxyuridine
  misc_feature (11)..(11): n is 2'-O-methyl-adenosine
  misc_feature (12)..(12): n is 2'-fluoro-2'-deoxycytidine
  misc_feature (16)..(18): n is 5-(N-benzylcarboxyamide)-2'-deoxyuridine
  misc_feature (19)..(19): n is 2'-O-methyl-adenosine
  misc_feature (20)..(20): n is 5-(N-benzylcarboxyamide)-2'-deoxyuridine
  misc_feature (21)..(21): n is 2'-O-methyl-adenosine
  misc_feature (24)..(24): n is 2'-O-methyl-guanosine
nnncngnnacnngcgnnnnnngcn

SEQ ID NO: 233 - DNA, 24 bp, Artificial Sequence
  Synthetic
  misc_feature (1)..(2): n is 5-(N-benzylcarboxyamide)-2'-deoxyuridine
  misc_feature (3)..(3): n is 2'-O-methyl-adenosine
  misc_feature (5)..(5): n is hexaethylene glycol
  misc_feature (7)..(8): n is 5-(N-benzylcarboxyamide)-2'-deoxyuridine
  misc_feature (10)..(10): n is 2'-O-methyl-cytidine
  misc_feature (11)..(11): n is 2'-O-methyl-adenosine
  misc_feature (12)..(12): n is 2'-O-methyl-cytidine
  misc_feature (16)..(18): n is 5-(N-benzylcarboxyamide)-2'-deoxyuridine
  misc_feature (19)..(19): n is 2'-O-methyl-adenosine
  misc_feature (20)..(20): n is 5-(N-benzylcarboxyamide)-2'-deoxyuridine
  misc_feature (21)..(21): n is 2'-O-methyl-adenosine
  misc_feature (23)..(23): n is 2'-O-methyl-cytidine
  misc_feature (24)..(24): n is 2'-O-methyl-guanosine
nnncngnnannngcgnnnnnngnn

SEQ ID NO: 234 - DNA, 24 bp, Artificial Sequence
  Synthetic
  misc_feature (1)..(2): n is 5-(N-benzylcarboxyamide)-2'-deoxyuridine
  misc_feature (3)..(3): n is 2'-O-methyl-adenosine
  misc_feature (5)..(5): n is hexaethylene glycol
  misc_feature (7)..(8): n is 5-(N-benzylcarboxyamide)-2'-deoxyuridine
  misc_feature (10)..(10): n is 2'-O-methyl-cytidine
  misc_feature (11)..(11): n is 2'-O-methyl-adenosine
  misc_feature (12)..(12): n is 2'-O-methyl-cytidine
  misc_feature (16)..(18): n is 5-(N-benzylcarboxyamide)-2'-deoxyuridine
  misc_feature (19)..(19): n is 2'-O-methyl-adenosine
  misc_feature (20)..(20): n is 5-(N-benzylcarboxyamide)-2'-deoxyuridine
  misc_feature (21)..(21): n is 2'-O-methyl-adenosine
  misc_feature (22)..(22): n is 2'-O-methyl-guanosine
  misc_feature (23)..(23): n is 2'-O-methyl-cytidine
  misc_feature (24)..(24): n is 2'-O-methyl-guanosine
nnncngnnannngcgnnnnnnnnn

SEQ ID NO: 235 - DNA, 24 bp, Artificial Sequence
  Synthetic
  misc_feature (1)..(2): n is 5-(N-benzylcarboxyamide)-2'-deoxyuridine
  misc_feature (3)..(3): n is 2'-O-methyl-adenosine
  misc_feature (5)..(5): n is hexaethylene glycol
  misc_feature (7)..(8): n is 5-(N-benzylcarboxyamide)-2'-deoxyuridine
  misc_feature (11)..(12): n is 1,3-propane diol
  misc_feature (16)..(18): n is 5-(N-benzylcarboxyamide)-2'-deoxyuridine
  misc_feature (19)..(19): n is 2'-O-methyl-adenosine
  misc_feature (20)..(20): n is 5-(N-benzylcarboxyamide)-2'-deoxyuridine
  misc_feature (21)..(21): n is 2'-O-methyl-adenosine
  misc_feature (24)..(24): n is 2'-O-methyl-guanosine
nnncngnnacnngcgnnnnnngcn

SEQ ID NO: 236 - DNA, 23 bp, Artificial Sequence
  Synthetic
  misc_feature (1)..(2): n is 5-(N-benzylcarboxyamide)-2'-deoxyuridine
  misc_feature (3)..(3): n is 2'-O-methyl-adenosine
  misc_feature (5)..(5): n is hexaethylene glycol
  misc_feature (7)..(8): n is 5-(N-benzylcarboxyamide)-2'-deoxyuridine
  misc_feature (11)..(11): n is 1,3-propane diol
  misc_feature (15)..(17): n is 5-(N-benzylcarboxyamide)-2'-deoxyuridine
  misc_feature (18)..(18): n is 2'-O-methyl-adenosine
  misc_feature (19)..(19): n is 5-(N-benzylcarboxyamide)-2'-deoxyuridine
  misc_feature (20)..(20): n is 2'-O-methyl-adenosine
  misc_feature (23)..(23): n is 2'-O-methyl-guanosine
nnncngnnacngcgnnnnnngcn

SEQ ID NO: 237 - DNA, 24 bp, Artificial Sequence
  Synthetic
  misc_feature (1)..(2): n is 5-(N-benzylcarboxyamide)-2'-deoxyuridine
  misc_feature (3)..(3): n is 2'-O-methyl-adenosine
  misc_feature (5)..(5): n is hexaethylene glycol
  misc_feature (7)..(8): n is 5-(N-benzylcarboxyamide)-2'-deoxyuridine
  misc_feature (11)..(11): n is 1,3-propane diol
  misc_feature (12)..(12): n is 2'-O-methyl-cytidine
  misc_feature (16)..(18): n is 5-(N-benzylcarboxyamide)-2'-deoxyuridine
  misc_feature (19)..(19): n is 2'-O-methyl-adenosine
  misc_feature (20)..(20): n is 5-(N-benzylcarboxyamide)-2'-deoxyuridine
  misc_feature (21)..(21): n is 2'-O-methyl-adenosine
  misc_feature (24)..(24): n is 2'-O-methyl-guanosine
nnncngnnacnngcgnnnnnngcn

SEQ ID NO: 238 - DNA, 24 bp, Artificial Sequence
  Synthetic
  misc_feature (1)..(2): n is 5-(N-benzylcarboxyamide)-2'-deoxyuridine
  misc_feature (3)..(3): n is 2'-O-methyl-adenosine
  misc_feature (5)..(5): n is hexaethylene glycol
  misc_feature (7)..(8): n is 5-(N-benzylcarboxyamide)-2'-deoxyuridine
  misc_feature (11)..(11): n is 2'-O-methyl-adenosine
  misc_feature (12)..(12): n is 1,3-propane diol
  misc_feature (16)..(18): n is 5-(N-benzylcarboxyamide)-2'-deoxyuridine
  misc_feature (19)..(19): n is 2'-O-methyl-adenosine
  misc_feature (20)..(20): n is 5-(N-benzylcarboxyamide)-2'-deoxyuridine
  misc_feature (21)..(21): n is 2'-O-methyl-adenosine
  misc_feature (24)..(24): n is 2'-O-methyl-guanosine
nnncngnnacnngcgnnnnnngcn

SEQ ID NO: 239 - DNA, 23 bp, Artificial Sequence
  Synthetic
  misc_feature (1)..(2): n is 5-(N-benzylcarboxyamide)-2'-deoxyuridine
  misc_feature (3)..(3): n is 2'-O-methyl-adenosine
  misc_feature (5)..(5): n is hexaethylene glycol
  misc_feature (7)..(8): n is 5-(N-benzylcarboxyamide)-2'-deoxyuridine
  misc_feature (11)..(11): n is hexaethylene glycol
  misc_feature (15)..(17): n is 5-(N-benzylcarboxyamide)-2'-deoxyuridine
  misc_feature (18)..(18): n is 2'-O-methyl-adenosine
  misc_feature (19)..(19): n is 5-(N-benzylcarboxyamide)-2'-deoxyuridine
  misc_feature (20)..(20): n is 2'-O-methyl-adenosine
  misc_feature (23)..(23): n is 2'-O-methyl-guanosine
nnncngnnacngcgnnnnnngcn

SEQ ID NO: 240 - DNA, 29 bp, Artificial Sequence
  Synthetic
  misc_feature (1)..(2): n is 5-(N-benzylcarboxyamide)-2'-deoxyuridine
  misc_feature (12)..(13): n is 5-(N-benzylcarboxyamide)-2'-deoxyuridine
  misc_feature (21)..(23): n is 5-(N-benzylcarboxyamide)-2'-deoxyuridine
  misc_feature (25)..(25): n is 5-(N-benzylcarboxyamide)-2'-deoxyuridine
nnacgcacgcgnnacacgcgnnnanagcg

SEQ ID NO: 241 - DNA, 27 bp, Artificial Sequence
  Synthetic
  misc_feature (1)..(2): n is 5-(N-benzylcarboxyamide)-2'-deoxyuridine
  misc_feature (10)..(11): n is 5-(N-benzylcarboxyamide)-2'-deoxyuridine
  misc_feature (19)..(21): n is 5-(N-benzylcarboxyamide)-2'-deoxyuridine
  misc_feature (23)..(23): n is 5-(N-benzylcarboxyamide)-2'-deoxyuridine
nnaccacggnnacacgcgnnnanagcg

SEQ ID NO: 242 - DNA, 24 bp, Artificial Sequence
  Synthetic
  misc_feature (1)..(2): n is 5-(N-benzylcarboxyamide)-2'-deoxyuridine
  misc_feature (3)..(3): n is 2'-O-methyl-adenosine
  misc_feature (5)..(5): n is hexaethylene glycol
  misc_feature (7)..(8): n is 5-(N-benzylcarboxyamide)-2'-deoxyuridine
  misc_feature (16)..(18): n is 5-(N-benzylcarboxyamide)-2'-deoxyuridine
  misc_feature (20)..(20): n is 5-(N-benzylcarboxyamide)-2'-deoxyuridine
  misc_feature (21)..(21): n is 2'-O-methyl-adenosine
  misc_feature (24)..(24): n is 2'-O-methyl-guanosine
nnncngnnactcgcgnnnanngcn

SEQ ID NO: 243 - DNA, 24 bp, Artificial Sequence
  Synthetic
  misc_feature (1)..(2): n is 5-(N-benzylcarboxyamide)-2'-deoxyuridine
  misc_feature (3)..(3): n is 2'-O-methyl-adenosine
  misc_feature (5)..(5): n is hexaethylene glycol
  misc_feature (7)..(8): n is 5-(N-benzylcarboxyamide)-2'-deoxyuridine
  misc_feature (16)..(18): n is 5-(N-benzylcarboxyamide)-2'-deoxyuridine
  misc_feature (20)..(20): n is 5-(N-benzylcarboxyamide)-2'-deoxyuridine
  misc_feature (21)..(21): n is 2'-O-methyl-adenosine
  misc_feature (24)..(24): n is 2'-O-methyl-guanosine
nnncngnnacccgcgnnnanngcn

SEQ ID NO: 244 - DNA, 24 bp, Artificial Sequence
  Synthetic
  misc_feature (1)..(2): n is 5-(N-benzylcarboxyamide)-2'-deoxyuridine
  misc_feature (3)..(3): n is 2'-O-methyl-adenosine
  misc_feature (5)..(5): n is hexaethylene glycol
  misc_feature (7)..(8): n is 5-(N-benzylcarboxyamide)-2'-deoxyuridine
  misc_feature (16)..(18): n is 5-(N-benzylcarboxyamide)-2'-deoxyuridine
  misc_feature (20)..(20): n is 5-(N-benzylcarboxyamide)-2'-deoxyuridine
  misc_feature (21)..(21): n is 2'-O-methyl-adenosine
  misc_feature (24)..(24): n is 2'-O-methyl-guanosine
nnncngnnacgcgcgnnnanngcn

SEQ ID NO: 245 - DNA, 24 bp, Artificial Sequence
  Synthetic
  misc_feature (1)..(2): n is 5-(N-benzylcarboxyamide)-2'-deoxyuridine
  misc_feature (3)..(3): n is 2'-O-methyl-adenosine
  misc_feature (5)..(5): n is hexaethylene glycol
  misc_feature (7)..(8): n is 5-(N-benzylcarboxyamide)-2'-deoxyuridine
  misc_feature (11)..(11): n is 2'-O-methyl-adenosine
  misc_feature (16)..(18): n is 5-(N-benzylcarboxyamide)-2'-deoxyuridine
  misc_feature (20)..(20): n is 5-(N-benzylcarboxyamide)-2'-deoxyuridine
  misc_feature (21)..(21): n is 2'-O-methyl-adenosine
  misc_feature (24)..(24): n is 2'-O-methyl-guanosine
nnncngnnacntgcgnnnanngcn

SEQ ID NO: 246 - DNA, 24 bp, Artificial Sequence
  Synthetic
  misc_feature (1)..(2): n is 5-(N-benzylcarboxyamide)-2'-deoxyuridine
  misc_feature (3)..(3): n is 2'-O-methyl-adenosine
  misc_feature (5)..(5): n is hexaethylene glycol
  misc_feature (7)..(8): n is 5-(N-benzylcarboxyamide)-2'-deoxyuridine
  misc_feature (11)..(11): n is 2'-O-methyl-adenosine
  misc_feature (16)..(18): n is 5-(N-benzylcarboxyamide)-2'-deoxyuridine
  misc_feature (20)..(20): n is 5-(N-benzylcarboxyamide)-2'-deoxyuridine
  misc_feature (21)..(21): n is 2'-O-methyl-adenosine
  misc_feature (24)..(24): n is 2'-O-methyl-guanosine
nnncngnnacnagcgnnnanngcn

SEQ ID NO: 247 - DNA, 24 bp, Artificial Sequence
  Synthetic
  misc_feature (1)..(2): n is 5-(N-benzylcarboxyamide)-2'-deoxyuridine
  misc_feature (3)..(3): n is 2'-O-methyl-adenosine
  misc_feature (5)..(5): n is hexaethylene glycol
  misc_feature (7)..(8): n is 5-(N-benzylcarboxyamide)-2'-deoxyuridine
  misc_feature (11)..(11): n is 2'-O-methyl-adenosine
  misc_feature (16)..(18): n is 5-(N-benzylcarboxyamide)-2'-deoxyuridine
  misc_feature (20)..(20): n is 5-(N-benzylcarboxyamide)-2'-deoxyuridine
  misc_feature (21)..(21): n is 2'-O-methyl-adenosine
  misc_feature (24)..(24): n is 2'-O-methyl-guanosine
nnncngnnacnggcgnnnanngcn

SEQ ID NO: 248 - DNA, 23 bp, Artificial Sequence
  Synthetic
  misc_feature (1)..(2): n is 5-(N-benzylcarboxyamide)-2'-deoxyuridine
  misc_feature (3)..(3): n is 2'-O-methyl-adenosine
  misc_feature (5)..(5): n is hexaethylene glycol
  misc_feature (7)..(8): n is 5-(N-benzylcarboxyamide)-2'-deoxyuridine
  misc_feature (15)..(17): n is 5-(N-benzylcarboxyamide)-2'-deoxyuridine
  misc_feature (19)..(19): n is 5-(N-benzylcarboxyamide)-2'-deoxyuridine
  misc_feature (20)..(20): n is 2'-O-methyl-adenosine
  misc_feature (23)..(23): n is 2'-O-methyl-guanosine
nnncngnnactgcgnnnanngcn

SEQ ID NO: 249 - DNA, 23 bp, Artificial Sequence
  Synthetic
  misc_feature (1)..(2): n is 5-(N-benzylcarboxyamide)-2'-deoxyuridine
  misc_feature (3)..(3): n is 2'-O-methyl-adenosine
  misc_feature (5)..(5): n is hexaethylene glycol
  misc_feature (7)..(8): n is 5-(N-benzylcarboxyamide)-2'-deoxyuridine
  misc_feature (15)..(17): n is 5-(N-benzylcarboxyamide)-2'-deoxyuridine
  misc_feature (19)..(19): n is 5-(N-benzylcarboxyamide)-2'-deoxyuridine
  misc_feature (20)..(20): n is 2'-O-methyl-adenosine
  misc_feature (23)..(23): n is 2'-O-methyl-guanosine
nnncngnnacagcgnnnanngcn

SEQ ID NO: 250 - DNA, 23 bp, Artificial Sequence
  Synthetic
  misc_feature (1)..(2): n is 5-(N-benzylcarboxyamide)-2'-deoxyuridine
  misc_feature (3)..(3): n is 2'-O-methyl-adenosine
  misc_feature (5)..(5): n is hexaethylene glycol
  misc_feature (7)..(8): n is 5-(N-benzylcarboxyamide)-2'-deoxyuridine
  misc_feature (15)..(17): n is 5-(N-benzylcarboxyamide)-2'-deoxyuridine
  misc_feature (19)..(19): n is 5-(N-benzylcarboxyamide)-2'-deoxyuridine
  misc_feature (20)..(20): n is 2'-O-methyl-adenosine
  misc_feature (23)..(23): n is 2'-O-methyl-guanosine
nnncngnnacggcgnnnanngcn

SEQ ID NO: 251 - DNA, 23 bp, Artificial Sequence
  Synthetic
  misc_feature (1)..(2): n is 5-(N-benzylcarboxyamide)-2'-deoxyuridine
  misc_feature (3)..(3): n is 2'-O-methyl-adenosine
  misc_feature (5)..(5): n is hexaethylene glycol
  misc_feature (7)..(8): n is 5-(N-benzylcarboxyamide)-2'-deoxyuridine
  misc_feature (15)..(17): n is 5-(N-benzylcarboxyamide)-2'-deoxyuridine
  misc_feature (19)..(19): n is 5-(N-benzylcarboxyamide)-2'-deoxyuridine
  misc_feature (20)..(20): n is 2'-O-methyl-adenosine
  misc_feature (23)..(23): n is 2'-O-methyl-guanosine
nnncngnnaccgcgnnnanngcn

SEQ ID NO: 252 - DNA, 24 bp, Artificial Sequence
  Synthetic
  misc_feature (1)..(2): n is 5-(N-benzylcarboxyamide)-2'-deoxyuridine
  misc_feature (3)..(3): n is 2'-O-methyl-adenosine
  misc_feature (5)..(5): n is hexaethylene glycol
  misc_feature (7)..(7): n is 5-(N-benzylcarboxyamide)-2'-O-methyl-uridine
  misc_feature (8)..(8): n is 5-(N-benzylcarboxyamide)-2'-deoxyuridine
  misc_feature (11)..(11): n is 2'-O-methyl-adenosine
  misc_feature (16)..(18): n is 5-(N-benzylcarboxyamide)-2'-deoxyuridine
  misc_feature (20)..(20): n is 5-(N-benzylcarboxyamide)-2'-deoxyuridine
  misc_feature (21)..(21): n is 2'-O-methyl-adenosine
  misc_feature (24)..(24): n is 2'-O-methyl-guanosine
nnncngnnacncgcgnnnanngcn

SEQ ID NO: 253 - DNA, 24 bp, Artificial Sequence
  Synthetic
  misc_feature (1)..(2): n is 5-(N-benzylcarboxyamide)-2'-deoxyuridine
  misc_feature (3)..(3): n is 2'-O-methyl-adenosine
  misc_feature (5)..(5): n is hexaethylene glycol
  misc_feature (7)..(7): n is 5-(N-benzylcarboxyamide)-2'-deoxyuridine
  misc_feature (8)..(8): n is 5-(N-benzylcarboxyamide)-2'-O-methyl-uridine
  misc_feature (11)..(11): n is 2'-O-methyl-adenosine
  misc_feature (16)..(18): n is 5-(N-benzylcarboxyamide)-2'-deoxyuridine
  misc_feature (20)..(20): n is 5-(N-benzylcarboxyamide)-2'-deoxyuridine
  misc_feature (21)..(21): n is 2'-O-methyl-adenosine
  misc_feature (24)..(24): n is 2'-O-methyl-guanosine
nnncngnnacncgcgnnnanngcn

SEQ ID NO: 254 - DNA, 24 bp, Artificial Sequence
  Synthetic
  misc_feature (1)..(2): n is 5-(N-benzylcarboxyamide)-2'-deoxyuridine
  misc_feature (3)..(3): n is 2'-O-methyl-adenosine
  misc_feature (5)..(5): n is hexaethylene glycol
  misc_feature (7)..(8): n is 5-(N-benzylcarboxyamide)-2'-deoxyuridine
  misc_feature (11)..(11): n is 2'-O-methyl-adenosine
  misc_feature (16)..(17): n is 5-(N-benzylcarboxyamide)-2'-deoxyuridine
  misc_feature (18)..(18): n is 5-(N-benzylcarboxyamide)-2'-O-methyl-uridine
  misc_feature (20)..(20): n is 5-(N-benzylcarboxyamide)-2'-deoxyuridine
  misc_feature (21)..(21): n is 2'-O-methyl-adenosine
  misc_feature (24)..(24): n is 2'-O-methyl-guanosine
nnncngnnacncgcgnnnanngcn

SEQ ID NO: 255 - DNA, 24 bp, Artificial Sequence
  Synthetic
  misc_feature (1)..(2): n is 5-(N-benzylcarboxyamide)-2'-deoxyuridine
  misc_feature (3)..(3): n is 2'-O-methyl-adenosine
  misc_feature (5)..(5): n is hexaethylene glycol
  misc_feature (7)..(8): n is 5-(N-benzylcarboxyamide)-2'-deoxyuridine
  misc_feature (11)..(11): n is 2'-O-methyl-adenosine
  misc_feature (16)..(18): n is 5-(N-benzylcarboxyamide)-2'-deoxyuridine
  misc_feature (20)..(20): n is 5-(N-benzylcarboxyamide)-2'-O-methyl-uridine
  misc_feature (21)..(21): n is 2'-O-methyl-adenosine
  misc_feature (24)..(24): n is 2'-O-methyl-guanosine
nnncngnnacncgcgnnnanngcn

SEQ ID NO: 256 - DNA, 24 bp, Artificial Sequence
  Synthetic
  misc_feature (1)..(2): n is 5-(N-benzylcarboxyamide)-2'-deoxyuridine
  misc_feature (3)..(3): n is 2'-O-methyl-adenosine
  misc_feature (5)..(5): n is hexaethylene glycol
  misc_feature (7)..(8): n is 5-(N-benzylcarboxyamide)-2'-deoxyuridine
  misc_feature (11)..(11): n is 2'-O-methyl-adenosine
  misc_feature (16)..(16): n is 5-(N-benzylcarboxyamide)-2'-deoxyuridine
  misc_feature (17)..(17): n is 5-[N-(phenyl-2-ethyl)-carboxyamide]-2'-deoxyuridine
  misc_feature (18)..(18): n is 5-(N-benzylcarboxyamide)-2'-deoxyuridine
  misc_feature (20)..(20): n is 5-[N-(3,4-methylenedioxyphenyl-methyl)carboxyamide]-2'-deoxyuridi ne
  misc_feature (21)..(21): n is 2'-O-methyl-adenosine
  misc_feature (24)..(24): n is 2'-O-methyl-guanosine
nnncngnnacncgcgnnnanngcn

SEQ ID NO: 257 - DNA, 24 bp, Artificial Sequence
  Synthetic
  misc_feature (1)..(2): n is 5-(N-benzylcarboxyamide)-2'-deoxyuridine
  misc_feature (3)..(3): n is 2'-O-methyl-adenosine
  misc_feature (5)..(5): n is hexaethylene glycol
  misc_feature (7)..(8): n is 5-(N-benzylcarboxyamide)-2'-deoxyuridine
  misc_feature (11)..(11): n is 2'-O-methyl-adenosine
  misc_feature (16)..(16): n is 5-(N-benzylcarboxyamide)-2'-deoxyuridine
  misc_feature (17)..(17): n is 5-[N-(phenyl-2-ethyl)-carboxyamide]-2'-deoxyuridine
  misc_feature (18)..(18): n is 5-[N-(2-thiophene-methyl)carboxyamide]-2'-deoxyuridine
  misc_feature (20)..(20): n is 5-[N-(3,4-methylenedioxyphenyl-methyl)carboxyamide]-2'-deoxyuridi ne
  misc_feature (21)..(21): n is 2'-O-methyl-adenosine
  misc_feature (24)..(24): n is 2'-O-methyl-guanosine
nnncngnnacncgcgnnnanngcn

SEQ ID NO: 258 - DNA, 24 bp, Artificial Sequence
  Synthetic
  misc_feature (1)..(2): n is 5-(N-benzylcarboxyamide)-2'-deoxyuridine
  misc_feature (3)..(3): n is 2'-O-methyl-adenosine
  misc_feature (5)..(5): n is hexaethylene glycol
  misc_feature (7)..(8): n is 5-(N-benzylcarboxyamide)-2'-deoxyuridine
  misc_feature (11)..(11): n is 2'-O-methyl-adenosine
  misc_feature (12)..(12): n is 2'-O-methyl-cytidine
  misc_feature (16)..(16): n is 5-(N-benzylcarboxyamide)-2'-deoxyuridine
  misc_feature (17)..(17): n is 5-[N-(phenyl-2-ethyl)-carboxyamide]-2'-deoxyuridine
  misc_feature (18)..(18): n is 5-[N-(2-thiophene-methyl)carboxyamide]-2'-deoxyuridine
  misc_feature (19)..(19): n is 2'-O-methyl-adenosine
  misc_feature (20)..(20): n is 5-(N-benzylcarboxyamide)-2'-deoxyuridine
  misc_feature (21)..(21): n is 2'-O-methyl-adenosine
  misc_feature (24)..(24): n is 2'-O-methyl-guanosine
nnncngnnacnngcgnnnnnngcn

SEQ ID NO: 259 - DNA, 24 bp, Artificial Sequence
  Synthetic
  misc_feature (1)..(2): n is 5-(N-benzylcarboxyamide)-2'-deoxyuridine
  misc_feature (3)..(3): n is 2'-O-methyl-adenosine
  misc_feature (5)..(5): n is hexaethylene glycol
  misc_feature (7)..(8): n is 5-(N-benzylcarboxyamide)-2'-deoxyuridine
  misc_feature (11)..(11): n is 2'-O-methyl-adenosine
  misc_feature (12)..(12): n is 2'-O-methyl-cytidine
  misc_feature (16)..(16): n is 5-[N-(2-thiophene-methyl)carboxyamide]-2'-deoxyuridine
  misc_feature (17)..(17): n is 5-[N-(phenyl-2-ethyl)-carboxyamide]-2'-deoxyuridine
  misc_feature (18)..(18): n is 5-[N-(2-thiophene-methyl)carboxyamide]-2'-deoxyuridine
  misc_feature (19)..(19): n is 2'-O-methyl-adenosine
  misc_feature (20)..(20): n is 5-(N-benzylcarboxyamide)-2'-deoxyuridine
  misc_feature (21)..(21): n is 2'-O-methyl-adenosine
  misc_feature (24)..(24): n is 2'-O-methyl-guanosine
nnncngnnacnngcgnnnnnngcn

SEQ ID NO: 260 - DNA, 24 bp, Artificial Sequence
  Synthetic
  misc_feature (1)..(2): n is 5-(N-benzylcarboxyamide)-2'-deoxyuridine
  misc_feature (3)..(3): n is 2'-O-methyl-adenosine
  misc_feature (5)..(5): n is hexaethylene glycol
  misc_feature (7)..(7): n is 5-(N-benzylcarboxyamide)-2'-O-methyl-uridine
  misc_feature (8)..(8): n is 5-(N-benzylcarboxyamide)-2'-deoxyuridine
  misc_feature (11)..(11): n is 2'-O-methyl-adenosine
  misc_feature (12)..(12): n is 2'-O-methyl-cytidine
  misc_feature (16)..(18): n is 5-(N-benzylcarboxyamide)-2'-deoxyuridine
  misc_feature (19)..(19): n is 2'-O-methyl-adenosine
  misc_feature (20)..(20): n is 5-(N-benzylcarboxyamide)-2'-deoxyuridine
  misc_feature (21)..(21): n is 2'-O-methyl-adenosine
  misc_feature (24)..(24): n is 2'-O-methyl-guanosine
nnncngnnacnngcgnnnnnngcn

SEQ ID NO: 261 - DNA, 24 bp, Artificial Sequence
  Synthetic
  misc_feature (1)..(2): n is 5-(N-benzylcarboxyamide)-2'-deoxyuridine
  misc_feature (3)..(3): n is 2'-O-methyl-adenosine
  misc_feature (5)..(5): n is hexaethylene glycol
  misc_feature (7)..(8): n is 5-(N-benzylcarboxyamide)-2'-deoxyuridine
  misc_feature (11)..(11): n is 2'-O-methyl-adenosine
  misc_feature (12)..(12): n is 2'-O-methyl-cytidine
  misc_feature (16)..(17): n is 5-(N-benzylcarboxyamide)-2'-deoxyuridine
  misc_feature (18)..(18): n is 5-(N-benzylcarboxyamide)-2'-O-methyl-uridine
  misc_feature (19)..(19): n is 2'-O-methyl-adenosine
  misc_feature (20)..(20): n is 5-(N-benzylcarboxyamide)-2'-deoxyuridine
  misc_feature (21)..(21): n is 2'-O-methyl-adenosine
  misc_feature (24)..(24): n is 2'-O-methyl-guanosine
nnncngnnacnngcgnnnnnngcn

SEQ ID NO: 262 - DNA, 24 bp, Artificial Sequence
  Synthetic
  misc_feature (1)..(2): n is 5-(N-benzylcarboxyamide)-2'-deoxyuridine
  misc_feature (3)..(3): n is 2'-O-methyl-adenosine
  misc_feature (5)..(5): n is hexaethylene glycol
  misc_feature (7)..(7): n is 5-(N-benzylcarboxyamide)-2'-O-methyl-uridine
  misc_feature (8)..(8): n is 5-(N-benzylcarboxyamide)-2'-deoxyuridine
  misc_feature (11)..(11): n is 2'-O-methyl-adenosine
  misc_feature (12)..(12): n is 2'-O-methyl-cytidine
  misc_feature (16)..(17): n is 5-(N-benzylcarboxyamide)-2'-deoxyuridine
  misc_feature (18)..(18): n is 5-(N-benzylcarboxyamide)-2'-O-methyl-uridine
  misc_feature (19)..(19): n is 2'-O-methyl-adenosine
  misc_feature (20)..(20): n is 5-(N-benzylcarboxyamide)-2'-deoxyuridine
  misc_feature (21)..(21): n is 2'-O-methyl-adenosine
  misc_feature (24)..(24): n is 2'-O-methyl-guanosine
nnncngnnacnngcgnnnnnngcn

SEQ ID NO: 263 - DNA, 24 bp, Artificial Sequence
  Synthetic
  misc_feature (1)..(2): n is 5-(N-benzylcarboxyamide)-2'-deoxyuridine
  misc_feature (3)..(3): n is 2'-O-methyl-adenosine
  misc_feature (5)..(5): n is hexaethylene glycol
  misc_feature (7)..(8): n is 5-(N-benzylcarboxyamide)-2'-deoxyuridine
  misc_feature (11)..(11): n is 2'-O-methyl-adenosine
  misc_feature (12)..(12): n is 2'-O-methyl-cytidine
  misc_feature (16)..(16): n is 5-(N-benzylcarboxyamide)-2'-deoxyuridine
  misc_feature (17)..(17): n is 5-[N-(phenyl-2-ethyl)-carboxyamide]-2'-deoxyuridine
  misc_feature (18)..(18): n is 5-(N-benzylcarboxyamide)-2'-O-methyl-uridine
  misc_feature (19)..(19): n is 2'-O-methyl-adenosine
  misc_feature (20)..(20): n is 5-(N-benzylcarboxyamide)-2'-deoxyuridine
  misc_feature (21)..(21): n is 2'-O-methyl-adenosine
  misc_feature (24)..(24): n is 2'-O-methyl-guanosine
nnncngnnacnngcgnnnnnngcn

SEQ ID NO: 264 - DNA, 24 bp, Artificial Sequence
  Synthetic
  misc_feature (1)..(2): n is 5-(N-benzylcarboxyamide)-2'-deoxyuridine
  misc_feature (3)..(3): n is 2'-O-methyl-adenosine
  misc_feature (5)..(5): n is hexaethylene glycol
  misc_feature (7)..(8): n is 5-(N-benzylcarboxyamide)-2'-deoxyuridine
  misc_feature (11)..(11): n is 2'-O-methyl-adenosine
  misc_feature (12)..(12): n is 2'-O-methyl-cytidine
  misc_feature (16)..(18): n is 5-(N-benzylcarboxyamide)-2'-deoxyuridine
  misc_feature (19)..(19): n is 2'-O-methyl-adenosine
  misc_feature (20)..(20): n is 5-[N-(3,4-methylenedioxyphenyl-methyl)carboxyamide]-2'-deoxyuridi ne
  misc_feature (21)..(21): n is 2'-O-methyl-adenosine
  misc_feature (24)..(24): n is 2'-O-methyl-guanosine
nnncngnnacnngcgnnnnnngcn

SEQ ID NO: 265 - DNA, 24 bp, Artificial Sequence
  Synthetic
  misc_feature (1)..(2): n is 5-(N-benzylcarboxyamide)-2'-deoxyuridine
  misc_feature (3)..(3): n is 2'-O-methyl-adenosine
  misc_feature (5)..(5): n is hexaethylene glycol
  misc_feature (7)..(8): n is 5-(N-benzylcarboxyamide)-2'-deoxyuridine
  misc_feature (11)..(11): n is 2'-O-methyl-adenosine
  misc_feature (12)..(12): n is 2'-O-methyl-cytidine
  misc_feature (16)..(16): n is 5-(N-benzylcarboxyamide)-2'-deoxyuridine
  misc_feature (17)..(17): n is 5-[N-(phenyl-2-ethyl)-carboxyamide]-2'-deoxyuridine
  misc_feature (18)..(18): n is 5-(N-benzylcarboxyamide)-2'-deoxyuridine
  misc_feature (19)..(19): n is 2'-O-methyl-adenosine
  misc_feature (20)..(20): n is 5-[N-(3,4-methylenedioxyphenyl-methyl)carboxyamide]-2'-deoxyuridi ne
  misc_feature (21)..(21): n is 2'-O-methyl-adenosine
  misc_feature (24)..(24): n is 2'-O-methyl-guanosine
nnncngnnacnngcgnnnnnngcn

SEQ ID NO: 266 - DNA, 24 bp, Artificial Sequence
  Synthetic
  misc_feature (1)..(2): n is 5-(N-benzylcarboxyamide)-2'-deoxyuridine
  misc_feature (3)..(3): n is 2'-O-methyl-adenosine
  misc_feature (5)..(5): n is hexaethylene glycol
  misc_feature (7)..(8): n is 5-(N-benzylcarboxyamide)-2'-deoxyuridine
  misc_feature (11)..(11): n is 2'-O-methyl-adenosine
  misc_feature (12)..(12): n is 2'-O-methyl-cytidine
  misc_feature (16)..(16): n is 5-(N-benzylcarboxyamide)-2'-deoxyuridine
  misc_feature (17)..(17): n is 5-[N-(phenyl-2-ethyl)-carboxyamide]-2'-deoxyuridine
  misc_feature (18)..(18): n is 5-[N-(2-thiophene-methyl)carboxyamide]-2'-deoxyuridine
  misc_feature (19)..(19): n is 2'-O-methyl-adenosine
  misc_feature (20)..(20): n is 5-[N-(3,4-methylenedioxyphenyl-methyl)carboxyamide]-2'-deoxyuridi ne
  misc_feature (21)..(21): n is 2'-O-methyl-adenosine
  misc_feature (24)..(24): n is 2'-O-methyl-guanosine
nnncngnnacnngcgnnnnnngcn

SEQ ID NO: 267 - DNA, 24 bp, Artificial Sequence
  Synthetic
  misc_feature (1)..(2): n is 5-(N-benzylcarboxyamide)-2'-deoxyuridine
  misc_feature (3)..(3): n is 2'-O-methyl-adenosine
  misc_feature (5)..(5): n is hexaethylene glycol
  misc_feature (7)..(8): n is 5-(N-benzylcarboxyamide)-2'-deoxyuridine
  misc_feature (11)..(11): n is 1,3-propane diol
  misc_feature (12)..(12): n is 2'-O-methyl-cytidine
  misc_feature (16)..(16): n is 5-(N-benzylcarboxyamide)-2'-deoxyuridine
  misc_feature (17)..(17): n is 5-[N-(phenyl-2-ethyl)-carboxyamide]-2'-deoxyuridine
  misc_feature (18)..(18): n is 5-(N-benzylcarboxyamide)-2'-deoxyuridine
  misc_feature (19)..(19): n is 2'-O-methyl-adenosine
  misc_feature (20)..(20): n is 5-[N-(3,4-methylenedioxyphenyl-methyl)carboxyamide]-2'-deoxyuridi ne
  misc_feature (21)..(21): n is 2'-O-methyl-adenosine
  misc_feature (24)..(24): n is 2'-O-methyl-guanosine
nnncngnnacnngcgnnnnnngcn

SEQ ID NO: 268 - DNA, 24 bp, Artificial Sequence
  Synthetic
  misc_feature (1)..(2): n is 5-(N-benzylcarboxyamide)-2'-deoxyuridine
  misc_feature (3)..(3): n is 2'-O-methyl-adenosine
  misc_feature (5)..(5): n is hexaethylene glycol
  misc_feature (7)..(8): n is 5-(N-benzylcarboxyamide)-2'-deoxyuridine
  misc_feature (11)..(11): n is 1,3-propane diol
  misc_feature (12)..(12): n is 2'-O-methyl-cytidine
  misc_feature (16)..(16): n is 5-(N-benzylcarboxyamide)-2'-deoxyuridine
  misc_feature (17)..(17): n is 5-[N-(phenyl-2-ethyl)-carboxyamide]-2'-deoxyuridine
  misc_feature (18)..(18): n is 5-[N-(2-thiophene-methyl)carboxyamide]-2'-deoxyuridine
  misc_feature (19)..(19): n is 2'-O-methyl-adenosine
  misc_feature (20)..(20): n is 5-[N-(3,4-methylenedioxyphenyl-methyl)carboxyamide]-2'-deoxyuridi ne
  misc_feature (21)..(21): n is 2'-O-methyl-adenosine
  misc_feature (24)..(24): n is 2'-O-methyl-guanosine
nnncngnnacnngcgnnnnnngcn

SEQ ID NO: 269 - DNA, 50 bp, Artificial Sequence
  Synthetic
  misc_feature (1)..(2): n is 5-(N-benzylcarboxyamide)-2'-deoxyuridine
  misc_feature (3)..(3): n is 2'-O-methyl-adenosine
  misc_feature (5)..(5): n is hexaethylene glycol
  misc_feature (7)..(8): n is 5-(N-benzylcarboxyamide)-2'-deoxyuridine
  misc_feature (11)..(11): n is 2'-O-methyl-adenosine
  misc_feature (16)..(16): n is 5-(N-benzylcarboxyamide)-2'-deoxyuridine
  misc_feature (17)..(17): n is 5-[N-(phenyl-2-ethyl)-carboxyamide]-2'-deoxyuridine
  misc_feature (18)..(18): n is 5-[N-(2-thiophene-methyl)carboxyamide]-2'-deoxyuridine
  misc_feature (20)..(20): n is 5-(N-benzylcarboxyamide)-2'-deoxyuridine
  misc_feature (21)..(21): n is 2'-O-methyl-adenosine
  misc_feature (24)..(24): n is 2'-O-methyl-guanosine
  misc_feature (25)..(26): n is hexaethylene glycol
  misc_feature (27)..(28): n is 5-(N-benzylcarboxyamide)-2'-deoxyuridine
  misc_feature (29)..(29): n is 2'-O-methyl-adenosine
  misc_feature (31)..(31): n is hexaethylene glycol
  misc_feature (33)..(34): n is 5-(N-benzylcarboxyamide)-2'-deoxyuridine
  misc_feature (37)..(37): n is 2'-O-methyl-adenosine
  misc_feature (42)..(42): n is 5-(N-benzylcarboxyamide)-2'-deoxyuridine
  misc_feature (43)..(43): n is 5-[N-(phenyl-2-ethyl)-carboxyamide]-2'-deoxyuridine
  misc_feature (44)..(44): n is 5-[N-(2-thiophene-methyl)carboxyamide]-2'-deoxyuridine
  misc_feature (46)..(46): n is 5-(N-benzylcarboxyamide)-2'-deoxyuridine
  misc_feature (47)..(47): n is 2'-O-methyl-adenosine
  misc_feature (50)..(50): n is 2'-O-methyl-guanosine
nnncngnnacncgcgnnnanngcnnnnnncngnnacncgcgnnnanngcn

SEQ ID NO: 270 - DNA, 51 bp, Artificial Sequence
  Synthetic
  misc_feature (1)..(2): n is 5-(N-benzylcarboxyamide)-2'-deoxyuridine
  misc_feature (3)..(3): n is 2'-O-methyl-adenosine
  misc_feature (5)..(5): n is hexaethylene glycol
  misc_feature (7)..(8): n is 5-(N-benzylcarboxyamide)-2'-deoxyuridine
  misc_feature (11)..(11): n is 2'-O-methyl-adenosine
  misc_feature (16)..(16): n is 5-(N-benzylcarboxyamide)-2'-deoxyuridine
  misc_feature (17)..(17): n is 5-[N-(phenyl-2-ethyl)-carboxyamide]-2'-deoxyuridine
  misc_feature (18)..(18): n is 5-[N-(2-thiophene-methyl)carboxyamide]-2'-deoxyuridine
  misc_feature (20)..(20): n is 5-(N-benzylcarboxyamide)-2'-deoxyuridine
  misc_feature (21)..(21): n is 2'-O-methyl-adenosine
  misc_feature (24)..(24): n is 2'-O-methyl-guanosine
  misc_feature (25)..(27): n is hexaethylene glycol
  misc_feature (28)..(29): n is 5-(N-benzylcarboxyamide)-2'-deoxyuridine
  misc_feature (30)..(30): n is 2'-O-methyl-adenosine
  misc_feature (32)..(32): n is hexaethylene glycol
  misc_feature (34)..(35): n is 5-(N-benzylcarboxyamide)-2'-deoxyuridine
  misc_feature (38)..(38): n is 2'-O-methyl-adenosine
  misc_feature (43)..(43): n is 5-(N-benzylcarboxyamide)-2'-deoxyuridine
  misc_feature (44)..(44): n is 5-[N-(phenyl-2-ethyl)-carboxyamide]-2'-deoxyuridine
  misc_feature (45)..(45): n is 5-[N-(2-thiophene-methyl)carboxyamide]-2'-deoxyuridine
  misc_feature (47)..(47): n is 5-(N-benzylcarboxyamide)-2'-deoxyuridine
  misc_feature (48)..(48): n is 2'-O-methyl-adenosine
  misc_feature (51)..(51): n is 2'-O-methyl-guanosine
nnncngnnacncgcgnnnanngcnnnnnnncngnnacncgcgnnnanngcn

SEQ ID NO: 271 - DNA, 52 bp, Artificial Sequence
  Synthetic
  misc_feature (1)..(2): n is 5-(N-benzylcarboxyamide)-2'-deoxyuridine
  misc_feature (3)..(3): n is 2'-O-methyl-adenosine
  misc_feature (5)..(5): n is hexaethylene glycol
  misc_feature (7)..(8): n is 5-(N-benzylcarboxyamide)-2'-deoxyuridine
  misc_feature (11)..(11): n is 2'-O-methyl-adenosine
  misc_feature (16)..(16): n is 5-(N-benzylcarboxyamide)-2'-deoxyuridine
  misc_feature (17)..(17): n is 5-[N-(phenyl-2-ethyl)-carboxyamide]-2'-deoxyuridine
  misc_feature (18)..(18): n is 5-[N-(2-thiophene-methyl)carboxyamide]-2'-deoxyuridine
  misc_feature (20)..(20): n is 5-(N-benzylcarboxyamide)-2'-deoxyuridine
  misc_feature (21)..(21): n is 2'-O-methyl-adenosine
  misc_feature (24)..(24): n is 2'-O-methyl-guanosine
  misc_feature (25)..(28): n is hexaethylene glycol
  misc_feature (29)..(30): n is 5-(N-benzylcarboxyamide)-2'-deoxyuridine
  misc_feature (31)..(31): n is 2'-O-methyl-adenosine
  misc_feature (33)..(33): n is hexaethylene glycol
  misc_feature (35)..(36): n is 5-(N-benzylcarboxyamide)-2'-deoxyuridine
  misc_feature (39)..(39): n is 2'-O-methyl-adenosine
  misc_feature (44)..(44): n is 5-(N-benzylcarboxyamide)-2'-deoxyuridine
  misc_feature (45)..(45): n is 5-[N-(phenyl-2-ethyl)-carboxyamide]-2'-deoxyuridine
  misc_feature (46)..(46): n is 5-[N-(2-thiophene-methyl)carboxyamide]-2'-deoxyuridine
  misc_feature (48)..(48): n is 5-(N-benzylcarboxyamide)-2'-deoxyuridine
  misc_feature (49)..(49): n is 2'-O-methyl-adenosine
  misc_feature (52)..(52): n is 2'-O-methyl-guanosine
nnncngnnacncgcgnnnanngcnnnnnnnncngnnacncgcgnnnanngcn

SEQ ID NO: 272 - DNA, 53 bp, Artificial Sequence
  Synthetic
  misc_feature (1)..(2): n is 5-(N-benzylcarboxyamide)-2'-deoxyuridine
  misc_feature (3)..(3): n is 2'-O-methyl-adenosine
  misc_feature (5)..(5): n is hexaethylene glycol
  misc_feature (7)..(8): n is 5-(N-benzylcarboxyamide)-2'-deoxyuridine
  misc_feature (11)..(11): n is 2'-O-methyl-adenosine
  misc_feature (16)..(16): n is 5-(N-benzylcarboxyamide)-2'-deoxyuridine
  misc_feature (17)..(17): n is 5-[N-(phenyl-2-ethyl)-carboxyamide]-2'-deoxyuridine
  misc_feature (18)..(18): n is 5-[N-(2-thiophene-methyl)carboxyamide]-2'-deoxyuridine
  misc_feature (20)..(20): n is 5-(N-benzylcarboxyamide)-2'-deoxyuridine
  misc_feature (21)..(21): n is 2'-O-methyl-adenosine
  misc_feature (24)..(24): n is 2'-O-methyl-guanosine
  misc_feature (25)..(29): n is hexaethylene glycol
  misc_feature (30)..(31): n is 5-(N-benzylcarboxyamide)-2'-deoxyuridine
  misc_feature (32)..(32): n is 2'-O-methyl-adenosine
  misc_feature (34)..(34): n is hexaethylene glycol
  misc_feature (36)..(37): n is 5-(N-benzylcarboxyamide)-2'-deoxyuridine
  misc_feature (40)..(40): n is 2'-O-methyl-adenosine
  misc_feature (45)..(45): n is 5-(N-benzylcarboxyamide)-2'-deoxyuridine
  misc_feature (46)..(46): n is 5-[N-(phenyl-2-ethyl)-carboxyamide]-2'-deoxyuridine
  misc_feature (47)..(47): n is 5-[N-(2-thiophene-methyl)carboxyamide]-2'-deoxyuridine
  misc_feature (49)..(49): n is 5-(N-benzylcarboxyamide)-2'-deoxyuridine
  misc_feature (50)..(50): n is 2'-O-methyl-adenosine
  misc_feature (53)..(53): n is 2'-O-methyl-guanosine
nnncngnnacncgcgnnnanngcnnnnnnnnncngnnacncgcgnnnanngcn

SEQ ID NO: 273 - DNA, 54 bp, Artificial Sequence
  Synthetic
  misc_feature (1)..(2): n is 5-(N-benzylcarboxyamide)-2'-deoxyuridine
  misc_feature (3)..(3): n is 2'-O-methyl-adenosine
  misc_feature (5)..(5): n is hexaethylene glycol
  misc_feature (7)..(8): n is 5-(N-benzylcarboxyamide)-2'-deoxyuridine
  misc_feature (11)..(11): n is 2'-O-methyl-adenosine
  misc_feature (16)..(16): n is 5-(N-benzylcarboxyamide)-2'-deoxyuridine
  misc_feature (17)..(17): n is 5-[N-(phenyl-2-ethyl)-carboxyamide]-2'-deoxyuridine
  misc_feature (18)..(18): n is 5-[N-(2-thiophene-methyl)carboxyamide]-2'-deoxyuridine
  misc_feature (20)..(20): n is 5-(N-benzylcarboxyamide)-2'-deoxyuridine
  misc_feature (21)..(21): n is 2'-O-methyl-adenosine
  misc_feature (24)..(24): n is 2'-O-methyl-guanosine
  misc_feature (25)..(30): n is hexaethylene glycol
  misc_feature (31)..(32): n is 5-(N-benzylcarboxyamide)-2'-deoxyuridine
  misc_feature (33)..(33): n is 2'-O-methyl-adenosine
  misc_feature (35)..(35): n is hexaethylene glycol
  misc_feature (37)..(38): n is 5-(N-benzylcarboxyamide)-2'-deoxyuridine
  misc_feature (41)..(41): n is 2'-O-methyl-adenosine
  misc_feature (46)..(46): n is 5-(N-benzylcarboxyamide)-2'-deoxyuridine
  misc_feature (47)..(47): n is 5-[N-(phenyl-2-ethyl)-carboxyamide]-2'-deoxyuridine
  misc_feature (48)..(48): n is 5-[N-(2-thiophene-methyl)carboxyamide]-2'-deoxyuridine
  misc_feature (50)..(50): n is 5-(N-benzylcarboxyamide)-2'-deoxyuridine
  misc_feature (51)..(51): n is 2'-O-methyl-adenosine
  misc_feature (54)..(54): n is 2'-O-methyl-guanosine
nnncngnnacncgcgnnnanngcnnnnnnnnnncngnnacncgcgnnnanngcn

SEQ ID NO: 274 - DNA, 27 bp, Artificial Sequence
  Synthetic
  misc_feature (1)..(2): n is 5-(N-benzylcarboxyamide)-2'-deoxyuridine
  misc_feature (3)..(3): n is 2'-O-methyl-adenosine
  misc_feature (5)..(5): n is hexaethylene glycol
  misc_feature (7)..(8): n is 5-(N-benzylcarboxyamide)-2'-deoxyuridine
  misc_feature (11)..(11): n is 2'-O-methyl-adenosine
  misc_feature (16)..(16): n is 5-(N-benzylcarboxyamide)-2'-deoxyuridine
  misc_feature (17)..(17): n is 5-[N-(phenyl-2-ethyl)-carboxyamide]-2'-deoxyuridine
  misc_feature (18)..(18): n is 5-[N-(2-thiophene-methyl)carboxyamide]-2'-deoxyuridine
  misc_feature (20)..(20): n is 5-(N-benzylcarboxyamide)-2'-deoxyuridine
  misc_feature (21)..(21): n is 2'-O-methyl-adenosine
  misc_feature (24)..(24): n is 2'-O-methyl-guanosine
  misc_feature (25)..(25): n is 1,3-propane diol
  misc_feature (26)..(26): n is 1,3-bis-[5-hydroxy-pentylamido]-2-propanol
nnncngnnacncgcgnnnanngcnnnt

SEQ ID NO: 275 - DNA, 27 bp, Artificial Sequence
  Synthetic
  misc_feature (1)..(2): n is 5-(N-benzylcarboxyamide)-2'-deoxyuridine
  misc_feature (3)..(3): n is 2'-O-methyl-adenosine
  misc_feature (5)..(5): n is hexaethylene glycol
  misc_feature (7)..(8): n is 5-(N-benzylcarboxyamide)-2'-deoxyuridine
  misc_feature (11)..(11): n is 2'-O-methyl-adenosine
  misc_feature (16)..(16): n is 5-(N-benzylcarboxyamide)-2'-deoxyuridine
  misc_feature (17)..(17): n is 5-[N-(phenyl-2-ethyl)-carboxyamide]-2'-deoxyuridine
  misc_feature (18)..(18): n is 5-[N-(2-thiophene-methyl)carboxyamide]-2'-deoxyuridine
  misc_feature (20)..(20): n is 5-(N-benzylcarboxyamide)-2'-deoxyuridine
  misc_feature (21)..(21): n is 2'-O-methyl-adenosine
  misc_feature (24)..(24): n is 2'-O-methyl-guanosine
  misc_feature (25)..(25): n is hexaethylene glycol
  misc_feature (26)..(26): n is 1,3-bis-[5-hydroxy-pentylamido]-2-propanol
nnncngnnacncgcgnnnanngcnnnt

SEQ ID NO: 276 - DNA, 28 bp, Artificial Sequence
  Synthetic
  misc_feature (1)..(2): n is 5-(N-benzylcarboxyamide)-2'-deoxyuridine
  misc_feature (3)..(3): n is 2'-O-methyl-adenosine
  misc_feature (5)..(5): n is hexaethylene glycol
  misc_feature (7)..(8): n is 5-(N-benzylcarboxyamide)-2'-deoxyuridine
  misc_feature (11)..(11): n is 2'-O-methyl-adenosine
  misc_feature (16)..(16): n is 5-(N-benzylcarboxyamide)-2'-deoxyuridine
  misc_feature (17)..(17): n is 5-[N-(phenyl-2-ethyl)-carboxyamide]-2'-deoxyuridine
  misc_feature (18)..(18): n is 5-[N-(2-thiophene-methyl)carboxyamide]-2'-deoxyuridine
  misc_feature (20)..(20): n is 5-(N-benzylcarboxyamide)-2'-deoxyuridine
  misc_feature (21)..(21): n is 2'-O-methyl-adenosine
  misc_feature (24)..(24): n is 2'-O-methyl-guanosine
  misc_feature (25)..(26): n is hexaethylene glycol
  misc_feature (27)..(27): n is 1,3-bis-[5-hydroxy-pentylamido]-2-propanol
nnncngnnacncgcgnnnanngcnnnnt

SEQ ID NO: 277 - DNA, 29 bp, Artificial Sequence
  Synthetic
  misc_feature (1)..(2): n is 5-(N-benzylcarboxyamide)-2'-deoxyuridine
  misc_feature (3)..(3): n is 2'-O-methyl-adenosine
  misc_feature (5)..(5): n is hexaethylene glycol
  misc_feature (7)..(8): n is 5-(N-benzylcarboxyamide)-2'-deoxyuridine
  misc_feature (11)..(11): n is 2'-O-methyl-adenosine
  misc_feature (16)..(16): n is 5-(N-benzylcarboxyamide)-2'-deoxyuridine
  misc_feature (17)..(17): n is 5-[N-(phenyl-2-ethyl)-carboxyamide]-2'-deoxyuridine
  misc_feature (18)..(18): n is 5-[N-(2-thiophene-methyl)carboxyamide]-2'-deoxyuridine
  misc_feature (20)..(20): n is 5-(N-benzylcarboxyamide)-2'-deoxyuridine
  misc_feature (21)..(21): n is 2'-O-methyl-adenosine
  misc_feature (24)..(24): n is 2'-O-methyl-guanosine
  misc_feature (25)..(27): n is hexaethylene glycol
  misc_feature (28)..(28): n is 1,3-bis-[5-hydroxy-pentylamido]-2-propanol
nnncngnnacncgcgnnnanngcnnnnnt

SEQ ID NO: 278 - DNA, 24 bp, Artificial Sequence
  Synthetic
  misc_feature (1)..(2): n is 5-(N-benzylcarboxyamide)-2'-deoxyuridine
  misc_feature (3)..(3): n is 2'-O-methyl-adenosine
  misc_feature (5)..(5): n is hexaethylene glycol
  misc_feature (7)..(7): n is 5-(N-benzylcarboxyamide)-2'-O-methyl-uridine
  misc_feature (8)..(8): n is 5-(N-benzylcarboxyamide)-2'-deoxyuridine
  misc_feature (11)..(11): n is 2'-O-methyl-adenosine
  misc_feature (12)..(12): n is 2'-O-methyl-cytidine
  misc_feature (16)..(16): n is 5-(N-benzylcarboxyamide)-2'-deoxyuridine
  misc_feature (17)..(17): n is 5-[N-(phenyl-2-ethyl)-carboxyamide]-2'-deoxyuridine
  misc_feature (18)..(18): n is 5-(N-benzylcarboxyamide)-2'-O-methyl-uridine
  misc_feature (18)..(18): n is 5-[N-(2-thiophene-methyl)carboxyamide]-2'-deoxyuridine
  misc_feature (19)..(19): n is 2'-O-methyl-adenosine
  misc_feature (20)..(20): n is 5-(N-benzylcarboxyamide)-2'-deoxyuridine
  misc_feature (21)..(21): n is 2'-O-methyl-adenosine
  misc_feature (24)..(24): n is 2'-O-methyl-guanosine
nnncngnnacnngcgnnnnnngcn

SEQ ID NO: 279 - DNA, 24 bp, Artificial Sequence
  Synthetic
  misc_feature (1)..(2): n is 5-(N-benzylcarboxyamide)-2'-deoxyuridine
  misc_feature (3)..(3): n is 2'-O-methyl-adenosine
  misc_feature (5)..(5): n is hexaethylene glycol
  misc_feature (6)..(6): n is 2'-fluoro-2'-deoxy-guanosine
  misc_feature (7)..(7): n is 5-(N-benzylcarboxyamide)-2'-O-methyl-uridine
  misc_feature (8)..(8): n is 5-(N-benzylcarboxyamide)-2'-deoxyuridine
  misc_feature (11)..(11): n is 2'-O-methyl-adenosine
  misc_feature (12)..(12): n is 2'-O-methyl-cytidine
  misc_feature (16)..(16): n is 5-(N-benzylcarboxyamide)-2'-deoxyuridine
  misc_feature (17)..(17): n is 5-[N-(phenyl-2-ethyl)-carboxyamide]-2'-deoxyuridine
  misc_feature (18)..(18): n is 5-(N-benzylcarboxyamide)-2'-O-methyl-uridine
  misc_feature (19)..(19): n is 2'-O-methyl-adenosine
  misc_feature (20)..(20): n is 5-(N-benzylcarboxyamide)-2'-deoxyuridine
  misc_feature (21)..(21): n is 2'-O-methyl-adenosine
  misc_feature (24)..(24): n is 2'-O-methyl-guanosine
nnncnnnnacnngcgnnnnnngcn

SEQ ID NO: 280 - DNA, 24 bp, Artificial Sequence
  Synthetic
  misc_feature (1)..(2): n is 5-(N-benzylcarboxyamide)-2'-deoxyuridine
  misc_feature (3)..(3): n is 2'-O-methyl-adenosine
  misc_feature (5)..(5): n is hexaethylene glycol
  misc_feature (7)..(7): n is 5-(N-benzylcarboxyamide)-2'-O-methyl-uridine
  misc_feature (8)..(8): n is 5-(N-benzylcarboxyamide)-2'-deoxyuridine
  misc_feature (11)..(11): n is 2'-O-methyl-adenosine
  misc_feature (12)..(12): n is 2'-O-methyl-cytidine
  misc_feature (13)..(13): n is 2'-fluoro-2'-deoxy-guanosine
  misc_feature (16)..(16): n is 5-(N-benzylcarboxyamide)-2'-deoxyuridine
  misc_feature (17)..(17): n is 5-[N-(phenyl-2-ethyl)-carboxyamide]-2'-deoxyuridine
  misc_feature (18)..(18): n is 5-(N-benzylcarboxyamide)-2'-O-methyl-uridine
  misc_feature (19)..(19): n is 2'-O-methyl-adenosine
  misc_feature (20)..(20): n is 5-(N-benzylcarboxyamide)-2'-deoxyuridine
  misc_feature (21)..(21): n is 2'-O-methyl-adenosine
  misc_feature (24)..(24): n is 2'-O-methyl-guanosine
nnncngnnacnnncgnnnnnngcn

SEQ ID NO: 281 - DNA, 24 bp, Artificial Sequence
  Synthetic
  misc_feature (1)..(2): n is 5-(N-benzylcarboxyamide)-2'-deoxyuridine
  misc_feature (3)..(3): n is 2'-O-methyl-adenosine
  misc_feature (5)..(5): n is hexaethylene glycol
  misc_feature (7)..(7): n is 5-(N-benzylcarboxyamide)-2'-O-methyl-uridine
  misc_feature (8)..(8): n is 5-(N-benzylcarboxyamide)-2'-deoxyuridine
  misc_feature (11)..(11): n is 2'-O-methyl-adenosine
  misc_feature (12)..(12): n is 2'-O-methyl-cytidine
  misc_feature (15)..(15): n is 2'-fluoro-2'-deoxy-guanosine
  misc_feature (16)..(16): n is 5-(N-benzylcarboxyamide)-2'-deoxyuridine
  misc_feature (17)..(17): n is 5-[N-(phenyl-2-ethyl)-carboxyamide]-2'-deoxyuridine
  misc_feature (18)..(18): n is 5-(N-benzylcarboxyamide)-2'-O-methyl-uridine
  misc_feature (19)..(19): n is 2'-O-methyl-adenosine
  misc_feature (20)..(20): n is 5-(N-benzylcarboxyamide)-2'-deoxyuridine
  misc_feature (21)..(21): n is 2'-O-methyl-adenosine
  misc_feature (24)..(24): n is 2'-O-methyl-guanosine
nnncngnnacnngcnnnnnnngcn

SEQ ID NO: 282 - DNA, 24 bp, Artificial Sequence
  Synthetic
  misc_feature (1)..(2): n is 5-(N-benzylcarboxyamide)-2'-deoxyuridine
  misc_feature (3)..(3): n is 2'-O-methyl-adenosine
  misc_feature (5)..(5): n is hexaethylene glycol
  misc_feature (7)..(7): n is 5-(N-benzylcarboxyamide)-2'-O-methyl-uridine
  misc_feature (8)..(8): n is 5-(N-benzylcarboxyamide)-2'-deoxyuridine
  misc_feature (11)..(11): n is 2'-O-methyl-adenosine
  misc_feature (12)..(12): n is 2'-O-methyl-cytidine
  misc_feature (16)..(16): n is 5-(N-benzylcarboxyamide)-2'-deoxyuridine
  misc_feature (17)..(17): n is 5-[N-(phenyl-2-ethyl)-carboxyamide]-2'-deoxyuridine
  misc_feature (18)..(18): n is 5-(N-benzylcarboxyamide)-2'-O-methyl-uridine
  misc_feature (19)..(19): n is 2'-O-methyl-adenosine
  misc_feature (20)..(20): n is 5-(N-benzylcarboxyamide)-2'-deoxyuridine
  misc_feature (21)..(21): n is 2'-O-methyl-adenosine
  misc_feature (22)..(22): n is 2'-fluoro-2'-deoxy-guanosine
  misc_feature (24)..(24): n is 2'-O-methyl-guanosine
nnncngnnacnngcgnnnnnnncn

SEQ ID NO: 283 - DNA, 24 bp, Artificial Sequence
  Synthetic
  misc_feature (1)..(2): n is 5-(N-benzylcarboxyamide)-2'-deoxyuridine
  misc_feature (3)..(3): n is 2'-O-methyl-adenosine
  misc_feature (4)..(4): n is 2'-fluoro-2'-deoxycytidine
  misc_feature (5)..(5): n is hexaethylene glycol
  misc_feature (7)..(7): n is 5-(N-benzylcarboxyamide)-2'-O-methyl-uridine
  misc_feature (8)..(8): n is 5-(N-benzylcarboxyamide)-2'-deoxyuridine
  misc_feature (11)..(11): n is 2'-O-methyl-adenosine
  misc_feature (12)..(12): n is 2'-O-methyl-cytidine
  misc_feature (16)..(16): n is 5-(N-benzylcarboxyamide)-2'-deoxyuridine
  misc_feature (17)..(17): n is 5-[N-(phenyl-2-ethyl)-carboxyamide]-2'-deoxyuridine
  misc_feature (18)..(18): n is 5-(N-benzylcarboxyamide)-2'-O-methyl-uridine
  misc_feature (19)..(19): n is 2'-O-methyl-adenosine
  misc_feature (20)..(20): n is 5-(N-benzylcarboxyamide)-2'-deoxyuridine
  misc_feature (21)..(21): n is 2'-O-methyl-adenosine
  misc_feature (24)..(24): n si 2'-O-methyl-guanosine
nnnnngnnacnngcgnnnnnngcn

SEQ ID NO: 284 - DNA, 24 bp, Artificial Sequence
  Synthetic
  misc_feature (1)..(2): n is 5-(N-benzylcarboxyamide)-2'-deoxyuridine
  misc_feature (3)..(3): n is 2'-O-methyl-adenosine
  misc_feature (5)..(5): n is hexaethylene glycol
  misc_feature (7)..(7): n is 5-(N-benzylcarboxyamide)-2'-O-methyl-uridine
  misc_feature (8)..(8): n is 5-(N-benzylcarboxyamide)-2'-deoxyuridine
  misc_feature (11)..(11): n is 2'-O-methyl-adenosine
  misc_feature (12)..(12): n is 2'-O-methyl-cytidine
  misc_feature (16)..(16): n is 5-(N-benzylcarboxyamide)-2'-deoxyuridine
  misc_feature (17)..(17): n is 5-[N-(phenyl-2-ethyl)-carboxyamide]-2'-deoxyuridine
  misc_feature (18)..(18): n is 5-(N-benzylcarboxyamide)-2'-O-methyl-uridine
  misc_feature (19)..(19): n is 2'-O-methyl-adenosine
  misc_feature (20)..(20): n is 5-(N-benzylcarboxyamide)-2'-deoxyuridine
  misc_feature (21)..(21): n is 2'-O-methyl-adenosine
  misc_feature (23)..(23): n is 2'-fluoro-2'-deoxycytidine
  misc_feature (24)..(24): n is 2'-O-methyl-guanosine
nnncngnnacnngcgnnnnnngnn

SEQ ID NO: 285 - DNA, 24 bp, Artificial Sequence
  Synthetic
  misc_feature (1)..(2): n is 5-(N-benzylcarboxyamide)-2'-deoxyuridine
  misc_feature (3)..(3): n is 2'-O-methyl-adenosine
  misc_feature (5)..(5): n is hexaethylene glycol
  misc_feature (7)..(8): n is 5-(N-benzylcarboxyamide)-2'-deoxyuridine
  misc_feature (9)..(9): n is 2'-fluoro-2'-deoxyadenosine
  misc_feature (11)..(11): n is 2'-O-methyl-adenosine
  misc_feature (12)..(12): n is 2'-O-methyl-cytidine
  misc_feature (16)..(16): n is 5-(N-benzylcarboxyamide)-2'-deoxyuridine
  misc_feature (17)..(17): n is 5-[N-(phenyl-2-ethyl)-carboxyamide]-2'-deoxyuridine
  misc_feature (18)..(18): n is 5-(N-benzylcarboxyamide)-2'-O-methyl-uridine
  misc_feature (19)..(19): n is 2'-O-methyl-adenosine
  misc_feature (20)..(20): n is 5-(N-benzylcarboxyamide)-2'-deoxyuridine
  misc_feature (21)..(21): n is 2'-O-methyl-adenosine
  misc_feature (24)..(24): n is 2'-O-methyl-guanosine
nnncngnnncnngcgnnnnnngcn

SEQ ID NO: 286 - DNA, 24 bp, Artificial Sequence
  Synthetic
  misc_feature (1)..(1): n is 5-[N-(2-naphthylmethyl)carboxyamide]-2'-deoxyuridine
  misc_feature (2)..(2): n is 5-(N-benzylcarboxyamide)-2'-deoxyuridine
  misc_feature (3)..(3): n is 2'-O-methyl-adenosine
  misc_feature (5)..(5): n is hexaethylene glycol
  misc_feature (7)..(8): n is 5-(N-benzylcarboxyamide)-2'-deoxyuridine
  misc_feature (11)..(11): n is 2'-O-methyl-adenosine
  misc_feature (12)..(12): n is 2'-O-methyl-cytidine
  misc_feature (16)..(16): n is 5-(N-benzylcarboxyamide)-2'-deoxyuridine
  misc_feature (17)..(17): n is 5-[N-(phenyl-2-ethyl)-carboxyamide]-2'-deoxyuridine
  misc_feature (18)..(18): n is 5-(N-benzylcarboxyamide)-2'-O-methyl-uridine
  misc_feature (19)..(19): n is 2'-O-methyl-adenosine
  misc_feature (20)..(20): n is 5-(N-benzylcarboxyamide)-2'-deoxyuridine
  misc_feature (21)..(21): n is 2'-O-methyl-adenosine
  misc_feature (24)..(24): n is 2'-O-methyl-guanosine
nnncngnnacnngcgnnnnnngcn

SEQ ID NO: 287 - DNA, 24 bp, Artificial Sequence
  Synthetic
  misc_feature (1)..(1): n is 5-[N-(4-fluorobenzyl)carboxyamide]-2'-deoxyuridine
  misc_feature (2)..(2): n is 5-(N-benzylcarboxyamide)-2'-deoxyuridine
  misc_feature (3)..(3): n is 2'-O-methyl-adenosine
  misc_feature (5)..(5): n is hexaethylene glycol
  misc_feature (7)..(8): n is 5-(N-benzylcarboxyamide)-2'-deoxyuridine
  misc_feature (11)..(11): n is 2'-O-methyl-adenosine
  misc_feature (12)..(12): n is 2'-O-methyl-cytidine
  misc_feature (16)..(16): n is 5-(N-benzylcarboxyamide)-2'-deoxyuridine
  misc_feature (17)..(17): n is 5-[N-(phenyl-2-ethyl)-carboxyamide]-2'-deoxyuridine
  misc_feature (18)..(18): n is 5-(N-benzylcarboxyamide)-2'-O-methyl-uridine
  misc_feature (19)..(19): n is 2'-O-methyl-adenosine
  misc_feature (20)..(20): n is 5-(N-benzylcarboxyamide)-2'-deoxyuridine
  misc_feature (21)..(21): n is 2'-O-methyl-adenosine
  misc_feature (24)..(24): n is 2'-O-methyl-guanosine
nnncngnnacnngcgnnnnnngcn

SEQ ID NO: 288 - DNA, 24 bp, Artificial Sequence
  Synthetic
  misc_feature (1)..(1): n is 5-[N-(1-naphthyl-2-ethyl)carboxyamide]-2'-deoxyuridine
  misc_feature (2)..(2): n is 5-(N-benzylcarboxyamide)-2'-deoxyuridine
  misc_feature (3)..(3): n is 2'-O-methyl-adenosine
  misc_feature (5)..(5): n is hexaethylene glycol
  misc_feature (7)..(8): n is 5-(N-benzylcarboxyamide)-2'-deoxyuridine
  misc_feature (11)..(11): n is 2'-O-methyl-adenosine
  misc_feature (12)..(12): n is 2'-O-methyl-cytidine
  misc_feature (16)..(16): n is 5-(N-benzylcarboxyamide)-2'-deoxyuridine
  misc_feature (17)..(17): n is 5-[N-(phenyl-2-ethyl)-carboxyamide]-2'-deoxyuridine
  misc_feature (18)..(18): n is 5-(N-benzylcarboxyamide)-2'-O-methyl-uridine
  misc_feature (19)..(19): n is 2'-O-methyl-adenosine
  misc_feature (20)..(20): n is 5-(N-benzylcarboxyamide)-2'-deoxyuridine
  misc_feature (21)..(21): n is 2'-O-methyl-adenosine
  misc_feature (24)..(24): n is 2'-O-methyl-guanosine
nnncngnnacnngcgnnnnnngcn

SEQ ID NO: 289 - DNA, 24 bp, Artificial Sequence
  Synthetic
  misc_feature (1)..(1): n is 5-[N-(2-naphthyl-2-ethyl)carboxyamide]-2'-deoxyuridine
  misc_feature (2)..(2): n is 5-(N-benzylcarboxyamide)-2'-deoxyuridine
  misc_feature (3)..(3): n is 2'-O-methyl-adenosine
  misc_feature (5)..(5): n is hexaethylene glycol
  misc_feature (7)..(8): n is 5-(N-benzylcarboxyamide)-2'-deoxyuridine
  misc_feature (11)..(11): n is 2'-O-methyl-adenosine
  misc_feature (12)..(12): n is 2'-O-methyl-cytidine
  misc_feature (16)..(16): n is 5-(N-benzylcarboxyamide)-2'-deoxyuridine
  misc_feature (17)..(17): n is 5-[N-(phenyl-2-ethyl)-carboxyamide]-2'-deoxyuridine
  misc_feature (18)..(18): n is 5-(N-benzylcarboxyamide)-2'-O-methyl-uridine
  misc_feature (19)..(19): n is 2'-O-methyl-adenosine
  misc_feature (20)..(20): n is 5-(N-benzylcarboxyamide)-2'-deoxyuridine
  misc_feature (21)..(21): n is 2'-O-methyl-adenosine
  misc_feature (24)..(24): n is 2'-O-methyl-guanosine
nnncngnnacnngcgnnnnnngcn

SEQ ID NO: 290 - DNA, 24 bp, Artificial Sequence
  Synthetic
  misc_feature (1)..(1): n is 5-[N-(phenyl-3-propyl)-carboxyamide]-2'-deoxyuridine
  misc_feature (2)..(2): n is 5-(N-benzylcarboxyamide)-2'-deoxyuridine
  misc_feature (3)..(3): n is 2'-O-methyl-adenosine
  misc_feature (5)..(5): n is hexaethylene glycol
  misc_feature (7)..(8): n is 5-(N-benzylcarboxyamide)-2'-deoxyuridine
  misc_feature (11)..(11): n is 2'-O-methyl-adenosine
  misc_feature (12)..(12): n is 2'-O-methyl-cytidine
  misc_feature (16)..(16): n is 5-(N-benzylcarboxyamide)-2'-deoxyuridine
  misc_feature (17)..(17): n is 5-[N-(phenyl-2-ethyl)-carboxyamide]-2'-deoxyuridine
  misc_feature (18)..(18): n is 5-(N-benzylcarboxyamide)-2'-O-methyl-uridine
  misc_feature (19)..(19): n is 2'-O-methyl-adenosine
  misc_feature (20)..(20): n is 5-(N-benzylcarboxyamide)-2'-deoxyuridine
  misc_feature (21)..(21): n is 2'-O-methyl-adenosine
  misc_feature (24)..(24): n is 2'-O-methyl-guanosine
nnncngnnacnngcgnnnnnngcn

SEQ ID NO: 291 - DNA, 24 bp, Artificial Sequence
  Synthetic
  misc_feature (1)..(1): n is 5-[N-isobutyl-carboxyamide]-2'-deoxyuridine
  misc_feature (2)..(2): n is 5-(N-benzylcarboxyamide)-2'-deoxyuridine
  misc_feature (3)..(3): n is 2'-O-methyl-adenosine
  misc_feature (5)..(5): n is hexaethylene glycol
  misc_feature (7)..(8): n is 5-(N-benzylcarboxyamide)-2'-deoxyuridine
  misc_feature (11)..(11): n is 2'-O-methyl-adenosine
  misc_feature (12)..(12): n is 2'-O-methyl-cytidine
  misc_feature (16)..(16): n is 5-(N-benzylcarboxyamide)-2'-deoxyuridine
  misc_feature (17)..(17): n is 5-[N-(phenyl-2-ethyl)-carboxyamide]-2'-deoxyuridine
  misc_feature (18)..(18): n is 5-(N-benzylcarboxyamide)-2'-O-methyl-uridine
  misc_feature (19)..(19): n is 2'-O-methyl-adenosine
  misc_feature (20)..(20): n is 5-(N-benzylcarboxyamide)-2'-deoxyuridine
  misc_feature (21)..(21): n is 2'-O-methyl-adenosine
  misc_feature (24)..(24): n is 2'-O-methyl-guanosine
nnncngnnacnngcgnnnnnngcn

SEQ ID NO: 292 - DNA, 24 bp, Artificial Sequence
  Synthetic
  misc_feature (1)..(1): n is 5-(N-benzylcarboxyamide)-2'-deoxyuridine
  misc_feature (2)..(2): n is 5-[N-(3,4-methylenedioxyphenyl-methyl)carboxyamide]-2'-deoxyuridi ne
  misc_feature (3)..(3): n is 2'-O-methyl-adenosine
  misc_feature (5)..(5): n is hexaethylene glycol
  misc_feature (7)..(8): n is 5-(N-benzylcarboxyamide)-2'-deoxyuridine
  misc_feature (11)..(11): n is 2'-O-methyl-adenosine
  misc_feature (12)..(12): n is 2'-O-methyl-cytidine
  misc_feature (16)..(16): n is 5-(N-benzylcarboxyamide)-2'-deoxyuridine
  misc_feature (17)..(17): n is 5-[N-(phenyl-2-ethyl)-carboxyamide]-2'-deoxyuridine
  misc_feature (18)..(18): n is 5-(N-benzylcarboxyamide)-2'-O-methyl-uridine
  misc_feature (19)..(19): n is 2'-O-methyl-adenosine
  misc_feature (20)..(20): n is 5-(N-benzylcarboxyamide)-2'-deoxyuridine
  misc_feature (21)..(21): n is 2'-O-methyl-adenosine
  misc_feature (24)..(24): n is 2'-O-methyl-guanosine
nnncngnnacnngcgnnnnnngcn

SEQ ID NO: 293 - DNA, 24 bp, Artificial Sequence
  Synthetic
  misc_feature (2)..(2): n is 5-(N-benzylcarboxyamide)-2'-deoxyuridine
  misc_feature (3)..(3): n is 2'-O-methyl-adenosine
  misc_feature (5)..(5): n is hexaethylene glycol
  misc_feature (7)..(8): n is 5-(N-benzylcarboxyamide)-2'-deoxyuridine
  misc_feature (11)..(11): n is 2'-O-methyl-adenosine
  misc_feature (16)..(18): n is 5-(N-benzylcarboxyamide)-2'-deoxyuridine
  misc_feature (20)..(20): n is 5-(N-benzylcarboxyamide)-2'-deoxyuridine
  misc_feature (21)..(21): n is 2'-O-methyl-adenosine
  misc_feature (24)..(24): n is 2'-O-methyl-guanosine
tnncngnnacncgcgnnnanngcn

SEQ ID NO: 294 - DNA, 24 bp, Artificial Sequence
  Synthetic
  misc_feature (1)..(1): n is 5-(N-benzylcarboxyamide)-2'-deoxyuridine
  misc_feature (3)..(3): n is 2'-O-methyl-adenosine
  misc_feature (5)..(5): n is hexaethylene glycol
  misc_feature (7)..(8): n is 5-(N-benzylcarboxyamide)-2'-deoxyuridine
  misc_feature (11)..(11): n is 2'-O-methyl-adenosine
  misc_feature (16)..(18): n is 5-(N-benzylcarboxyamide)-2'-deoxyuridine
  misc_feature (20)..(20): n is 5-(N-benzylcarboxyamide)-2'-deoxyuridine
  misc_feature (21)..(21): n is 2'-O-methyl-adenosine
  misc_feature (24)..(24): n is 2'-O-methyl-guanosine
ntncngnnacncgcgnnnanngcn

SEQ ID NO: 295 - DNA, 24 bp, Artificial Sequence
  Synthetic
  misc_feature (1)..(2): n is 5-(N-benzylcarboxyamide)-2'-deoxyuridine
  misc_feature (3)..(3): n is 2'-O-methyl-adenosine
  misc_feature (5)..(5): n is hexaethylene glycol
  misc_feature (8)..(8): n is 5-(N-benzylcarboxyamide)-2'-deoxyuridine
  misc_feature (11)..(11): n is 2'-O-methyl-adenosine
  misc_feature (16)..(18): n is 5-(N-benzylcarboxyamide)-2'-deoxyuridine
  misc_feature (20)..(20): n is 5-(N-benzylcarboxyamide)-2'-deoxyuridine
  misc_feature (21)..(21): n is 2'-O-methyl-adenosine
  misc_feature (24)..(24): n is 2'-O-methyl-guanosine
nnncngtnacncgcgnnnanngcn

SEQ ID NO: 296 - DNA, 24 bp, Artificial Sequence
  Synthetic
  misc_feature (1)..(2): n is 5-(N-benzylcarboxyamide)-2'-deoxyuridine
  misc_feature (3)..(3): n is 2'-O-methyl-adenosine
  misc_feature (5)..(5): n is hexaethylene glycol
  misc_feature (7)..(8): n is 5-(N-benzylcarboxyamide)-2'-deoxyuridine
  misc_feature (9)..(9): n is 2'-deoxyadenosine-3'-phosphorothioate
  misc_feature (11)..(11): n is 2'-O-methyl-adenosine
  misc_feature (12)..(12): n is 2'-O-methyl-cytidine
  misc_feature (16)..(16): n is 5-(N-benzylcarboxyamide)-2'-deoxyuridine
  misc_feature (17)..(17): n is 5-[N-(phenyl-2-ethyl)-carboxyamide]-2'-deoxyuridine
  misc_feature (18)..(18): n is 5-(N-benzylcarboxyamide)-2'-O-methyl-uridine
  misc_feature (19)..(19): n is 2'-O-methyl-adenosine
  misc_feature (20)..(20): n is 5-(N-benzylcarboxyamide)-2'-deoxyuridine
  misc_feature (21)..(21): n is 2'-O-methyl-adenosine
  misc_feature (24)..(24): n is 2'-O-methyl-guanosine
nnncngnnncnngcgnnnnnngcn

SEQ ID NO: 297 - DNA, 24 bp, Artificial Sequence
  Synthetic
  misc_feature (1)..(2): n is 5-(N-benzylcarboxyamide)-2'-deoxyuridine
  misc_feature (3)..(3): n is 2'-O-methyl-adenosine
  misc_feature (5)..(5): n is hexaethylene glycol
  misc_feature (7)..(7): n is 5-(N-benzylcarboxyamide)-2'-O-methyl-uridine
  misc_feature (8)..(8): n is 5-(N-benzylcarboxyamide)-2'-deoxyuridine
  misc_feature (9)..(9): n is 2'-deoxyadenosine-3'-phosphorothioate
  misc_feature (11)..(11): n is 2'-O-methyl-adenosine
  misc_feature (12)..(12): n is 2'-O-methyl-cytidine
  misc_feature (16)..(16): n is 5-(N-benzylcarboxyamide)-2'-deoxyuridine
  misc_feature (17)..(17): n is 5-[N-(phenyl-2-ethyl)-carboxyamide]-2'-deoxyuridine
  misc_feature (18)..(18): n is 5-(N-benzylcarboxyamide)-2'-O-methyl-uridine
  misc_feature (19)..(19): n is 2'-O-methyl-adenosine
  misc_feature (20)..(20): n is 5-(N-benzylcarboxyamide)-2'-deoxyuridine
  misc_feature (21)..(21): n is 2'-O-methyl-adenosine
  misc_feature (24)..(24): n is 2'-O-methyl-guanosine
nnncngnnncnngcgnnnnnngcn

SEQ ID NO: 298 - DNA, 24 bp, Artificial Sequence
  Synthetic
  misc_feature (1)..(2): n is 5-(N-benzylcarboxyamide)-2'-deoxyuridine
  misc_feature (3)..(3): n is 2'-O-methyl-adenosine
  misc_feature (5)..(5): n is hexaethylene glycol
  misc_feature (7)..(8): n is 5-(N-benzylcarboxyamide)-2'-deoxyuridine
  misc_feature (11)..(11): n is 2'-O-methyl-adenosine
  misc_feature (12)..(12): n is 2'-O-methyl-cytidine
  misc_feature (15)..(15): n is 2'-deoxyguanosine-3'-phosphorothioate
  misc_feature (16)..(16): n is 5-(N-benzylcarboxyamide)-2'-deoxyuridine
  misc_feature (17)..(17): n is 5-[N-(phenyl-2-ethyl)-carboxyamide]-2'-deoxyuridine
  misc_feature (18)..(18): n is 5-(N-benzylcarboxyamide)-2'-O-methyl-uridine
  misc_feature (19)..(19): n is 2'-O-methyl-adenosine
  misc_feature (20)..(20): n is 5-(N-benzylcarboxyamide)-2'-deoxyuridine
  misc_feature (21)..(21): n is 2'-O-methyl-adenosine
  misc_feature (24)..(24): n is 2'-O-methyl-guanosine
nnncngnnacnngcnnnnnnngcn

SEQ ID NO: 299 - DNA, 24 bp, Artificial Sequence
  Synthetic
  misc_feature (1)..(2): n is 5-(N-benzylcarboxyamide)-2'-deoxyuridine
  misc_feature (3)..(3): n is 2'-O-methyl-adenosine
  misc_feature (5)..(5): n is hexaethylene glycol
  misc_feature (7)..(7): n is 5-(N-benzylcarboxyamide)-2'-O-methyl-uridine
  misc_feature (8)..(8): n is 5-(N-benzylcarboxyamide)-2'-deoxyuridine
  misc_feature (11)..(11): n is 2'-O-methyl-adenosine
  misc_feature (12)..(12): n is 2'-O-methyl-cytidine
  misc_feature (15)..(15): n is 2'-deoxyguanosine-3'-phosphorothioate
  misc_feature (16)..(16): n is 5-(N-benzylcarboxyamide)-2'-deoxyuridine
  misc_feature (17)..(17): n is 5-[N-(phenyl-2-ethyl)-carboxyamide]-2'-deoxyuridine
  misc_feature (18)..(18): n is 5-(N-benzylcarboxyamide)-2'-O-methyl-uridine
  misc_feature (19)..(19): n is 2'-O-methyl-adenosine
  misc_feature (20)..(20): n is 5-(N-benzylcarboxyamide)-2'-deoxyuridine
  misc_feature (21)..(21): n is 2'-O-methyl-adenosine
  misc_feature (24)..(24): n is 2'-O-methyl-guanosine
nnncngnnacnngcnnnnnnngcn

SEQ ID NO: 300 - DNA, 24 bp, Artificial Sequence
  Synthetic
  misc_feature (1)..(2): n is 5-(N-benzylcarboxyamide)-2'-deoxyuridine
  misc_feature (3)..(3): n is 2'-O-methyl-adenosine
  misc_feature (5)..(5): n is hexaethylene glycol
  misc_feature (7)..(8): n is 5-(N-benzylcarboxyamide)-2'-deoxyuridine
  misc_feature (9)..(9): n is 2'-deoxyadenosine-3'-phosphorothioate
  misc_feature (11)..(11): n is 2'-O-methyl-adenosine
  misc_feature (12)..(12): n is 2'-O-methyl-cytidine
  misc_feature (15)..(15): n is 2'-deoxyguanosine-3'-phosphorothioate
  misc_feature (16)..(16): n is 5-(N-benzylcarboxyamide)-2'-deoxyuridine
  misc_feature (17)..(17): n is 5-[N-(phenyl-2-ethyl)-carboxyamide]-2'-deoxyuridine
  misc_feature (18)..(18): n is 5-(N-benzylcarboxyamide)-2'-O-methyl-uridine
  misc_feature (19)..(19): n is 2'-O-methyl-adenosine
  misc_feature (20)..(20): n is 5-(N-benzylcarboxyamide)-2'-deoxyuridine
  misc_feature (21)..(21): n is 2'-O-methyl-adenosine
  misc_feature (24)..(24): n is 2'-O-methyl-guanosine
nnncngnnncnngcnnnnnnngcn

SEQ ID NO: 301 - DNA, 24 bp, Artificial Sequence
  Synthetic
  misc_feature (1)..(2): n is 5-(N-benzylcarboxyamide)-2'-deoxyuridine
  misc_feature (3)..(3): n is 2'-O-methyl-adenosine
  misc_feature (5)..(5): n is hexaethylene glycol
  misc_feature (7)..(7): n is 5-(N-benzylcarboxyamide)-2'-O-methyl-uridine
  misc_feature (8)..(8): n is 5-(N-benzylcarboxyamide)-2'-deoxyuridine
  misc_feature (9)..(9): n is 2'-deoxyadenosine-3'-phosphorothioate
  misc_feature (11)..(11): n is 2'-O-methyl-adenosine
  misc_feature (12)..(12): n is 2'-O-methyl-cytidine
  misc_feature (15)..(15): n is 2'-deoxyguanosine-3'-phosphorothioate
  misc_feature (16)..(16): n is 5-(N-benzylcarboxyamide)-2'-deoxyuridine
  misc_feature (17)..(17): n is 5-[N-(phenyl-2-ethyl)-carboxyamide]-2'-deoxyuridine
  misc_feature (18)..(18): n is 5-(N-benzylcarboxyamide)-2'-O-methyl-uridine
  misc_feature (19)..(19): n is 2'-O-methyl-adenosine
  misc_feature (20)..(20): n is 5-(N-benzylcarboxyamide)-2'-deoxyuridine
  misc_feature (21)..(21): n is 2'-O-methyl-adenosine
  misc_feature (24)..(24): n is 2'-O-methyl-guanosine
nnncngnnncnngcnnnnnnngcn

SEQ ID NO: 302 - DNA, 24 bp, Artificial Sequence
  Synthetic
  misc_feature (1)..(1): n is 5-[N-(4-fluorobenzyl)carboxyamide]-2'-deoxyuridine
  misc_feature (2)..(2): n is 5-(N-benzylcarboxyamide)-2'-deoxyuridine
  misc_feature (3)..(3): n is 2'-O-methyl-adenosine
  misc_feature (5)..(5): n is hexaethylene glycol
  misc_feature (7)..(7): n is 5-(N-benzylcarboxyamide)-2'-O-methyl-uridine
  misc_feature (8)..(8): n is 5-(N-benzylcarboxyamide)-2'-deoxyuridine
  misc_feature (11)..(11): n is 2'-O-methyl-adenosine
  misc_feature (12)..(12): n is 2'-O-methyl-cytidine
  misc_feature (16)..(17): n is 5-(N-benzylcarboxyamide)-2'-deoxyuridine
  misc_feature (18)..(18): n is 5-(N-benzylcarboxyamide)-2'-O-methyl-uridine
  misc_feature (19)..(19): n is 2'-O-methyl-adenosine
  misc_feature (20)..(20): n is 5-(N-benzylcarboxyamide)-2'-deoxyuridine
  misc_feature (21)..(21): n is 2'-O-methyl-adenosine
  misc_feature (24)..(24): n is 2'-O-methyl-guanosine
nnncngnnacnngcgnnnnnngcn

SEQ ID NO: 303 - DNA, 24 bp, Artificial Sequence
  Synthetic
  misc_feature (1)..(1): n is 5-(N-benzylcarboxyamide)-2'-deoxyuridine
  misc_feature (2)..(2): n is 5-[N-(3,4-methylenedioxyphenyl-methyl)carboxyamide]-2'-deoxyuridi ne
  misc_feature (3)..(3): n is 2'-O-methyl-adenosine
  misc_feature (5)..(5): n is hexaethylene glycol
  misc_feature (7)..(7): n is 5-(N-benzylcarboxyamide)-2'-O-methyl-uridine
  misc_feature (8)..(8): n is 5-(N-benzylcarboxyamide)-2'-deoxyuridine
  misc_feature (11)..(11): n is 2'-O-methyl-adenosine
  misc_feature (12)..(12): n is 2'-O-methyl-cytidine
  misc_feature (16)..(17): n is 5-(N-benzylcarboxyamide)-2'-deoxyuridine
  misc_feature (18)..(18): n is 5-(N-benzylcarboxyamide)-2'-O-methyl-uridine
  misc_feature (19)..(19): n is 2'-O-methyl-adenosine
  misc_feature (20)..(20): n is 5-(N-benzylcarboxyamide)-2'-deoxyuridine
  misc_feature (21)..(21): n is 2'-O-methyl-adenosine
  misc_feature (24)..(24): n is 2'-O-methyl-guanosine
nnncngnnacnngcgnnnnnngcn

SEQ ID NO: 304 - DNA, 24 bp, Artificial Sequence
  Synthetic
  misc_feature (1)..(1): n is 5-[N-(4-fluorobenzyl)carboxyamide]-2'-deoxyuridine
  misc_feature (2)..(2): n is 5-[N-(3,4-methylenedioxyphenyl-methyl)carboxyamide]-2'-deoxyuridi ne
  misc_feature (3)..(3): n is 2'-O-methyl-adenosine
  misc_feature (5)..(5): n is hexaethylene glycol
  misc_feature (7)..(7): n is 5-(N-benzylcarboxyamide)-2'-O-methyl-uridine
  misc_feature (8)..(8): n is 5-(N-benzylcarboxyamide)-2'-deoxyuridine
  misc_feature (11)..(11): n is 2'-O-methyl-adenosine
  misc_feature (12)..(12): n is 2'-O-methyl-cytidine
  misc_feature (16)..(17): n is 5-(N-benzylcarboxyamide)-2'-deoxyuridine
  misc_feature (18)..(18): n is 5-(N-benzylcarboxyamide)-2'-O-methyl-uridine
  misc_feature (19)..(19): n is 2'-O-methyl-adenosine
  misc_feature (20)..(20): n is 5-(N-benzylcarboxyamide)-2'-deoxyuridine
  misc_feature (21)..(21): n is 2'-O-methyl-adenosine
  misc_feature (24)..(24): n is 2'-O-methyl-guanosine
nnncngnnacnngcgnnnnnngcn

SEQ ID NO: 305 - DNA, 24 bp, Artificial Sequence
  Synthetic
  misc_feature (1)..(1): n is 5-[N-(4-fluorobenzyl)carboxyamide]-2'-deoxyuridine
  misc_feature (2)..(2): n is 5-(N-benzylcarboxyamide)-2'-deoxyuridine
  misc_feature (3)..(3): n is 2'-O-methyl-adenosine
  misc_feature (5)..(5): n is hexaethylene glycol
  misc_feature (7)..(7): n is 5-(N-benzylcarboxyamide)-2'-O-methyl-uridine
  misc_feature (8)..(8): n is 5-(N-benzylcarboxyamide)-2'-deoxyuridine
  misc_feature (11)..(11): n is 1,3-propane diol
  misc_feature (12)..(12): n is 2'-O-methyl-cytidine
  misc_feature (16)..(17): n is 5-(N-benzylcarboxyamide)-2'-deoxyuridine
  misc_feature (18)..(18): n is 5-(N-benzylcarboxyamide)-2'-O-methyl-uridine
  misc_feature (19)..(19): n is 2'-O-methyl-adenosine
  misc_feature (20)..(20): n is 5-(N-benzylcarboxyamide)-2'-deoxyuridine
  misc_feature (21)..(21): n is 2'-O-methyl-adenosine
  misc_feature (24)..(24): n is 2'-O-methyl-guanosine
nnncngnnacnngcgnnnnnngcn

SEQ ID NO: 306 - DNA, 24 bp, Artificial Sequence
  Synthetic
  misc_feature (1)..(1): n is 5-(N-benzylcarboxyamide)-2'-deoxyuridine
  misc_feature (2)..(2): n is 5-[N-(3,4-methylenedioxyphenyl-methyl)carboxyamide]-2'-deoxyuridi ne
  misc_feature (3)..(3): n is 2'-O-methyl-adenosine
  misc_feature (5)..(5): n is hexaethylene glycol
  misc_feature (7)..(7): n is 5-(N-benzylcarboxyamide)-2'-O-methyl-uridine
  misc_feature (8)..(8): n is 5-(N-benzylcarboxyamide)-2'-deoxyuridine
  misc_feature (11)..(11): n is 1,3-propane diol
  misc_feature (12)..(12): n is 2'-O-methyl-cytidine
  misc_feature (16)..(17): n is 5-(N-benzylcarboxyamide)-2'-deoxyuridine
  misc_feature (18)..(18): n is 5-(N-benzylcarboxyamide)-2'-O-methyl-uridine
  misc_feature (19)..(19): n is 2'-O-methyl-adenosine
  misc_feature (20)..(20): n is 5-(N-benzylcarboxyamide)-2'-deoxyuridine
  misc_feature (21)..(21): n is 2'-O-methyl-adenosine
  misc_feature (24)..(24): n is 2'-O-methyl-guanosine
nnncngnnacnngcgnnnnnngcn

SEQ ID NO: 307 - DNA, 24 bp, Artificial Sequence
  Synthetic
  misc_feature (1)..(1): n is 5-[N-(4-fluorobenzyl)carboxyamide]-2'-deoxyuridine
  misc_feature (2)..(2): n is 5-[N-(3,4-methylenedioxyphenyl-methyl)carboxyamide]-2'-deoxyuridi ne
  misc_feature (3)..(3): n is 2'-O-methyl-adenosine
  misc_feature (5)..(5): n is hexaethylene glycol
  misc_feature (7)..(7): n is 5-(N-benzylcarboxyamide)-2'-O-methyl-uridine
  misc_feature (8)..(8): n is 5-(N-benzylcarboxyamide)-2'-deoxyuridine
  misc_feature (11)..(11): n is 1,3-propane diol
  misc_feature (12)..(12): n is 2'-O-methyl-cytidine
  misc_feature (16)..(17): n is 5-(N-benzylcarboxyamide)-2'-deoxyuridine
  misc_feature (18)..(18): n is 5-(N-benzylcarboxyamide)-2'-O-methyl-uridine
  misc_feature (19)..(19): n is 2'-O-methyl-adenosine
  misc_feature (20)..(20): n is 5-(N-benzylcarboxyamide)-2'-deoxyuridine
  misc_feature (21)..(21): n is 2'-O-methyl-adenosine
  misc_feature (24)..(24): n is 2'-O-methyl-guanosine
nnncngnnacnngcgnnnnnngcn

SEQ ID NO: 308 - DNA, 24 bp, Artificial Sequence
  Synthetic
  misc_feature (1)..(1): n is 5-[N-(4-fluorobenzyl)carboxyamide]-2'-deoxyuridine
  misc_feature (2)..(2): n is 5-(N-benzylcarboxyamide)-2'-deoxyuridine
  misc_feature (3)..(3): n is 2'-O-methyl-adenosine
  misc_feature (5)..(5): n is hexaethylene glycol
  misc_feature (7)..(7): n is 5-(N-benzylcarboxyamide)-2'-O-methyl-uridine
  misc_feature (8)..(8): n is 5-(N-benzylcarboxyamide)-2'-deoxyuridine
  misc_feature (11)..(11): n is 2'-O-methyl-adenosine
  misc_feature (12)..(12): n is 2'-O-methyl-cytidine
  misc_feature (16)..(16): n is 5-(N-benzylcarboxyamide)-2'-deoxyuridine
  misc_feature (17)..(17): n is 5-[N-(phenyl-2-ethyl)-carboxyamide]-2'-deoxyuridine
  misc_feature (18)..(18): n is 5-(N-benzylcarboxyamide)-2'-O-methyl-uridine
  misc_feature (19)..(19): n is 2'-O-methyl-adenosine
  misc_feature (20)..(20): n is 5-(N-benzylcarboxyamide)-2'-deoxyuridine
  misc_feature (21)..(21): n is 2'-O-methyl-adenosine
  misc_feature (24)..(24): n is 2'-O-methyl-guanosine
nnncngnnacnngcgnnnnnngcn

SEQ ID NO: 309 - DNA, 24 bp, Artificial Sequence
  Synthetic
  misc_feature (1)..(1): n is 5-(N-benzylcarboxyamide)-2'-deoxyuridine
  misc_feature (2)..(2): n is 5-[N-(3,4-methylenedioxyphenyl-methyl)carboxyamide]-2'-deoxyuridi ne
  misc_feature (3)..(3): n is 2'-O-methyl-adenosine
  misc_feature (5)..(5): n is hexaethylene glycol
  misc_feature (7)..(7): n is 5-(N-benzylcarboxyamide)-2'-O-methyl-uridine
  misc_feature (8)..(8): n is 5-(N-benzylcarboxyamide)-2'-deoxyuridine
  misc_feature (11)..(11): n is 2'-O-methyl-adenosine
  misc_feature (12)..(12): n is 2'-O-methyl-cytidine
  misc_feature (16)..(16): n is 5-(N-benzylcarboxyamide)-2'-deoxyuridine
  misc_feature (17)..(17): n is 5-[N-(phenyl-2-ethyl)-carboxyamide]-2'-deoxyuridine
  misc_feature (18)..(18): n is 5-(N-benzylcarboxyamide)-2'-O-methyl-uridine
  misc_feature (19)..(19): n is 2'-O-methyl-adenosine
  misc_feature (20)..(20): n is 5-(N-benzylcarboxyamide)-2'-deoxyuridine
  misc_feature (21)..(21): n is 2'-O-methyl-adenosine
  misc_feature (24)..(24): n is 2'-O-methyl-guanosine
nnncngnnacnngcgnnnnnngcn

SEQ ID NO: 310 - DNA, 24 bp, Artificial Sequence
  Synthetic
  misc_feature (1)..(1): n is 5-[N-(4-fluorobenzyl)carboxyamide]-2'-deoxyuridine
  misc_feature (2)..(2): n is 5-[N-(3,4-methylenedioxyphenyl-methyl)carboxyamide]-2'-deoxyuridi ne
  misc_feature (3)..(3): n is 2'-O-methyl-adenosine
  misc_feature (5)..(5): n is hexaethylene glycol
  misc_feature (7)..(7): n is 5-(N-benzylcarboxyamide)-2'-O-methyl-uridine
  misc_feature (8)..(8): n is 5-(N-benzylcarboxyamide)-2'-deoxyuridine
  misc_feature (11)..(11): n is 2'-O-methyl-adenosine
  misc_feature (12)..(12): n is 2'-O-methyl-cytidine
  misc_feature (16)..(16): n is 5-(N-benzylcarboxyamide)-2'-deoxyuridine
  misc_feature (17)..(17): n is 5-[N-(phenyl-2-ethyl)-carboxyamide]-2'-deoxyuridine
  misc_feature (18)..(18): n is 5-(N-benzylcarboxyamide)-2'-O-methyl-uridine
  misc_feature (19)..(19): n is 2'-O-methyl-adenosine
  misc_feature (20)..(20): n is 5-(N-benzylcarboxyamide)-2'-deoxyuridine
  misc_feature (21)..(21): n is 2'-O-methyl-adenosine
  misc_feature (24)..(24): n is 2'-O-methyl-guanosine
nnncngnnacnngcgnnnnnngcn

SEQ ID NO: 311 - DNA, 24 bp, Artificial Sequence
  Synthetic
  misc_feature (1)..(1): n is 5-[N-(4-fluorobenzyl)carboxyamide]-2'-deoxyuridine
  misc_feature (2)..(2): n is 5-(N-benzylcarboxyamide)-2'-deoxyuridine
  misc_feature (3)..(3): n is 2'-O-methyl-adenosine
  misc_feature (5)..(5): n is hexaethylene glycol
  misc_feature (7)..(7): n is 5-(N-benzylcarboxyamide)-2'-O-methyl-uridine
  misc_feature (8)..(8): n is 5-(N-benzylcarboxyamide)-2'-deoxyuridine
  misc_feature (11)..(11): n is 1,3-propane diol
  misc_feature (12)..(12): n is 2'-O-methyl-cytidine
  misc_feature (16)..(16): n is 5-(N-benzylcarboxyamide)-2'-deoxyuridine
  misc_feature (17)..(17): n is 5-[N-(phenyl-2-ethyl)-carboxyamide]-2'-deoxyuridine
  misc_feature (18)..(18): n is 5-(N-benzylcarboxyamide)-2'-O-methyl-uridine
  misc_feature (19)..(19): n is 2'-O-methyl-adenosine
  misc_feature (20)..(20): n is 5-(N-benzylcarboxyamide)-2'-deoxyuridine
  misc_feature (21)..(21): n is 2'-O-methyl-adenosine
  misc_feature (24)..(24): n is 2'-O-methyl-guanosine
nnncngnnacnngcgnnnnnngcn

SEQ ID NO: 312 - DNA, 24 bp, Artificial Sequence
  Synthetic
  misc_feature (1)..(1): n is 5-(N-benzylcarboxyamide)-2'-deoxyuridine
  misc_feature (2)..(2): n is 5-[N-(3,4-methylenedioxyphenyl-methyl)carboxyamide]-2'-deoxyuridi ne
  misc_feature (3)..(3): n is 2'-O-methyl-adenosine
  misc_feature (5)..(5): n is hexaethylene glycol
  misc_feature (7)..(7): n is 5-(N-benzylcarboxyamide)-2'-O-methyl-uridine
  misc_feature (8)..(8): n is 5-(N-benzylcarboxyamide)-2'-deoxyuridine
  misc_feature (11)..(11): n is 1,3-propane diol
  misc_feature (12)..(12): n is 2'-O-methyl-cytidine
  misc_feature (16)..(16): n is 5-(N-benzylcarboxyamide)-2'-deoxyuridine
  misc_feature (17)..(17): n is 5-[N-(phenyl-2-ethyl)-carboxyamide]-2'-deoxyuridine
  misc_feature (18)..(18): n is 5-(N-benzylcarboxyamide)-2'-O-methyl-uridine
  misc_feature (19)..(19): n is 2'-O-methyl-adenosine
  misc_feature (20)..(20): n is 5-(N-benzylcarboxyamide)-2'-deoxyuridine
  misc_feature (21)..(21): n is 2'-O-methyl-adenosine
  misc_feature (24)..(24): n is 2'-O-methyl-guanosine
nnncngnnacnngcgnnnnnngcn

SEQ ID NO: 313 - DNA, 24 bp, Artificial Sequence
  Synthetic
  misc_feature (1)..(1): n is 5-[N-(4-fluorobenzyl)carboxyamide]-2'-deoxyuridine
  misc_feature (2)..(2): n is 5-[N-(3,4-methylenedioxyphenyl-methyl)carboxyamide]-2'-deoxyuridi ne
  misc_feature (3)..(3): n is 2'-O-methyl-adenosine
  misc_feature (5)..(5): n is hexaethylene glycol
  misc_feature (7)..(7): n is 5-(N-benzylcarboxyamide)-2'-O-methyl-uridine
  misc_feature (8)..(8): n is 5-(N-benzylcarboxyamide)-2'-deoxyuridine
  misc_feature (11)..(11): n is 1,3-propane diol
  misc_feature (12)..(12): n is 2'-O-methyl-cytidine
  misc_feature (16)..(16): n is 5-(N-benzylcarboxyamide)-2'-deoxyuridine
  misc_feature (17)..(17): n is 5-[N-(phenyl-2-ethyl)-carboxyamide]-2'-deoxyuridine
  misc_feature (18)..(18): n is 5-(N-benzylcarboxyamide)-2'-O-methyl-uridine
  misc_feature (19)..(19): n is 2'-O-methyl-adenosine
  misc_feature (20)..(20): n is 5-(N-benzylcarboxyamide)-2'-deoxyuridine
  misc_feature (21)..(21): n is 2'-O-methyl-adenosine
  misc_feature (24)..(24): n is 2'-O-methyl-guanosine
nnncngnnacnngcgnnnnnngcn

SEQ ID NO: 314 - DNA, 24 bp, Artificial Sequence
  Synthetic
  misc_feature (1)..(2): n is 5-(N-benzylcarboxyamide)-2'-deoxyuridine
  misc_feature (3)..(3): n is 2'-O-methyl-adenosine
  misc_feature (5)..(5): n is hexaethylene glycol
  misc_feature (7)..(8): n is 5-(N-benzylcarboxyamide)-2'-deoxyuridine
  misc_feature (9)..(9): n is 2'-deoxyadenosine-3'-phosphorothioate
  misc_feature (11)..(11): n is 2'-O-methyl-adenosine
  misc_feature (12)..(12): n is 2'-O-methyl-cytidine
  misc_feature (15)..(15): n is 2'-deoxyguanosine-3'-phosphorothioate
  misc_feature (16)..(17): n is 5-(N-benzylcarboxyamide)-2'-deoxyuridine
  misc_feature (18)..(18): n is 5-(N-benzylcarboxyamide)-2'-O-methyl-uridine
  misc_feature (19)..(19): n is 2'-O-methyl-adenosine
  misc_feature (20)..(20): n is 5-(N-benzylcarboxyamide)-2'-deoxyuridine
  misc_feature (21)..(21): n is 2'-O-methyl-adenosine
  misc_feature (24)..(24): n is 2'-O-methyl-guanosine
nnncngnnncnngcnnnnnnngcn

SEQ ID NO: 315 - DNA, 24 bp, Artificial Sequence
  Synthetic
  misc_feature (1)..(2): n is 5-(N-benzylcarboxyamide)-2'-deoxyuridine
  misc_feature (3)..(3): n is 2'-O-methyl-adenosine
  misc_feature (5)..(5): n is hexaethylene glycol
  misc_feature (7)..(7): n is 5-(N-benzylcarboxyamide)-2'-O-methyl-uridine
  misc_feature (8)..(8): n is 5-(N-benzylcarboxyamide)-2'-deoxyuridine
  misc_feature (9)..(9): n is 2'-deoxyadenosine-3'-phosphorothioate
  misc_feature (11)..(11): n is 2'-O-methyl-adenosine
  misc_feature (12)..(12): n is 2'-O-methyl-cytidine
  misc_feature (15)..(15): n is 2'-deoxyguanosine-3'-phosphorothioate
  misc_feature (16)..(17): n is 5-(N-benzylcarboxyamide)-2'-deoxyuridine
  misc_feature (18)..(18): n is 5-(N-benzylcarboxyamide)-2'-O-methyl-uridine
  misc_feature (19)..(19): n is 2'-O-methyl-adenosine
  misc_feature (20)..(20): n is 5-(N-benzylcarboxyamide)-2'-deoxyuridine
  misc_feature (21)..(21): n is 2'-O-methyl-adenosine
  misc_feature (24)..(24): n is 2'-O-methyl-guanosine
nnncngnnncnngcnnnnnnngcn

SEQ ID NO: 316 - DNA, 24 bp, Artificial Sequence
  Synthetic
  misc_feature (1)..(2): n is 5-(N-benzylcarboxyamide)-2'-deoxyuridine
  misc_feature (3)..(3): n is 2'-O-methyl-adenosine
  misc_feature (5)..(5): n is hexaethylene glycol
  misc_feature (7)..(7): n is 5-(N-benzylcarboxyamide)-2'-O-methyl-uridine
  misc_feature (8)..(8): n is 5-(N-benzylcarboxyamide)-2'-deoxyuridine
  misc_feature (9)..(9): n is 2'-deoxyadenosine-3'-phosphorothioate
  misc_feature (11)..(11): n is 1,3-propane diol
  misc_feature (12)..(12): n is 2'-O-methyl-cytidine
  misc_feature (15)..(15): n is 2'-deoxyguanosine-3'-phosphorothioate
  misc_feature (16)..(16): n is 5-(N-benzylcarboxyamide)-2'-deoxyuridine
  misc_feature (17)..(17): n is 5-[N-(phenyl-2-ethyl)-carboxyamide]-2'-deoxyuridine
  misc_feature (18)..(18): n is 5-(N-benzylcarboxyamide)-2'-O-methyl-uridine
  misc_feature (19)..(19): n is 2'-O-methyl-adenosine
  misc_feature (20)..(20): n is 5-(N-benzylcarboxyamide)-2'-deoxyuridine
  misc_feature (21)..(21): n is 2'-O-methyl-adenosine
  misc_feature (24)..(24): n is 2'-O-methyl-guanosine
nnncngnnncnngcnnnnnnngcn

SEQ ID NO: 317 - DNA, 24 bp, Artificial Sequence
  Synthetic
  misc_feature (1)..(2): n is 5-(N-benzylcarboxyamide)-2'-deoxyuridine
  misc_feature (3)..(3): n is 2'-O-methyl-adenosine
  misc_feature (5)..(5): n is hexaethylene glycol
  misc_feature (7)..(8): n is 5-(N-benzylcarboxyamide)-2'-deoxyuridine
  misc_feature (9)..(9): n is 2'-deoxyadenosine-3'-phosphorothioate
  misc_feature (11)..(11): n is 1,3-propane diol
  misc_feature (12)..(12): n is 2'-O-methyl-cytidine
  misc_feature (15)..(15): n is 2'-deoxyguanosine-3'-phosphorothioate
  misc_feature (16)..(17): n is 5-(N-benzylcarboxyamide)-2'-deoxyuridine
  misc_feature (18)..(18): n is 5-(N-benzylcarboxyamide)-2'-O-methyl-uridine
  misc_feature (19)..(19): n is 2'-O-methyl-adenosine
  misc_feature (20)..(20): n is 5-(N-benzylcarboxyamide)-2'-deoxyuridine
  misc_feature (21)..(21): n is 2'-O-methyl-adenosine
  misc_feature (24)..(24): n is 2'-O-methyl-guanosine
nnncngnnncnngcnnnnnnngcn

SEQ ID NO: 318 - DNA, 24 bp, Artificial Sequence
  Synthetic
  misc_feature (1)..(2): n is 5-(N-benzylcarboxyamide)-2'-deoxyuridine
  misc_feature (3)..(3): n is 2'-O-methyl-adenosine
  misc_feature (5)..(5): n is hexaethylene glycol
  misc_feature (7)..(7): n is 5-(N-benzylcarboxyamide)-2'-O-methyl-uridine
  misc_feature (8)..(8): n is 5-(N-benzylcarboxyamide)-2'-deoxyuridine
  misc_feature (9)..(9): n is 2'-deoxyadenosine-3'-phosphorothioate
  misc_feature (11)..(11): n is 1,3-propane diol
  misc_feature (12)..(12): n is 2'-O-methyl-cytidine
  misc_feature (15)..(15): n is 2'-deoxyguanosine-3'-phosphorothioate
  misc_feature (16)..(17): n is 5-(N-benzylcarboxyamide)-2'-deoxyuridine
  misc_feature (18)..(18): n is 5-(N-benzylcarboxyamide)-2'-O-methyl-uridine
  misc_feature (19)..(19): n is 2'-O-methyl-adenosine
  misc_feature (20)..(20): n is 5-(N-benzylcarboxyamide)-2'-deoxyuridine
  misc_feature (21)..(21): n is 2'-O-methyl-adenosine
  misc_feature (24)..(24): n is 2'-O-methyl-guanosine
nnncngnnncnngcnnnnnnngcn

SEQ ID NO: 319 - DNA, 24 bp, Artificial Sequence
  Synthetic
  misc_feature (1)..(1): n is 5-[N-(4-fluorobenzyl)carboxyamide]-2'-deoxyuridine
  misc_feature (2)..(2): n is 5-(N-benzylcarboxyamide)-2'-deoxyuridine
  misc_feature (3)..(3): n is 2'-O-methyl-adenosine
  misc_feature (5)..(5): n is hexaethylene glycol
  misc_feature (7)..(8): n is 5-(N-benzylcarboxyamide)-2'-deoxyuridine
  misc_feature (9)..(9): n is 2'-deoxyadenosine-3'-phosphorothioate
  misc_feature (11)..(11): n is 2'-O-methyl-adenosine
  misc_feature (12)..(12): n is 2'-O-methyl-cytidine
  misc_feature (15)..(15): n is 2'-deoxyguanosine-3'-phosphorothioate
  misc_feature (16)..(16): n is 5-(N-benzylcarboxyamide)-2'-deoxyuridine
  misc_feature (17)..(17): n is 5-[N-(phenyl-2-ethyl)-carboxyamide]-2'-deoxyuridine
  misc_feature (18)..(18): n is 5-(N-benzylcarboxyamide)-2'-O-methyl-uridine
  misc_feature (19)..(19): n is 2'-O-methyl-adenosine
  misc_feature (20)..(20): n is 5-(N-benzylcarboxyamide)-2'-deoxyuridine
  misc_feature (21)..(21): n is 2'-O-methyl-adenosine
  misc_feature (24)..(24): n is 2'-O-methyl-guanosine
nnncngnnncnngcnnnnnnngcn

SEQ ID NO: 320 - DNA, 24 bp, Artificial Sequence
  Synthetic
  misc_feature (1)..(1): n is 5-(N-benzylcarboxyamide)-2'-deoxyuridine
  misc_feature (2)..(2): n is 5-[N-(3,4-methylenedioxyphenyl-methyl)carboxyamide]-2'-deoxyuridi ne
  misc_feature (3)..(3): n is 2'-O-methyl-adenosine
  misc_feature (5)..(5): n is hexaethylene glycol
  misc_feature (7)..(8): n is 5-(N-benzylcarboxyamide)-2'-deoxyuridine
  misc_feature (9)..(9): n is 2'-deoxyadenosine-3'-phosphorothioate
  misc_feature (11)..(11): n is 2'-O-methyl-adenosine
  misc_feature (12)..(12): n is 2'-O-methyl-cytidine
  misc_feature (15)..(15): n is 2'-deoxyguanosine-3'-phosphorothioate
  misc_feature (16)..(16): n is 5-(N-benzylcarboxyamide)-2'-deoxyuridine
  misc_feature (17)..(17): n is 5-[N-(phenyl-2-ethyl)-carboxyamide]-2'-deoxyuridine
  misc_feature (18)..(18): n is 5-(N-benzylcarboxyamide)-2'-O-methyl-uridine
  misc_feature (19)..(19): n is 2'-O-methyl-adenosine
  misc_feature (20)..(20): n is 5-(N-benzylcarboxyamide)-2'-deoxyuridine
  misc_feature (21)..(21): n is 2'-O-methyl-adenosine
  misc_feature (24)..(24): n is 2'-O-methyl-guanosine
nnncngnnncnngcnnnnnnngcn

SEQ ID NO: 321 - DNA, 24 bp, Artificial Sequence
  Synthetic
  misc_feature (1)..(1): n is 5-[N-(4-fluorobenzyl)carboxyamide]-2'-deoxyuridine
  misc_feature (2)..(2): n is 5-[N-(3,4-methylenedioxyphenyl-methyl)carboxyamide]-2'-deoxyuridi ne
  misc_feature (3)..(3): n is 2'-O-methyl-adenosine
  misc_feature (5)..(5): n is hexaethylene glycol
  misc_feature (7)..(8): n is 5-(N-benzylcarboxyamide)-2'-deoxyuridine
  misc_feature (9)..(9): n is 2'-deoxyadenosine-3'-phosphorothioate
  misc_feature (11)..(11): n is 2'-O-methyl-adenosine
  misc_feature (12)..(12): n is 2'-O-methyl-cytidine
  misc_feature (15)..(15): n is 2'-deoxyguanosine-3'-phosphorothioate
  misc_feature (16)..(16): n is 5-(N-benzylcarboxyamide)-2'-deoxyuridine
  misc_feature (17)..(17): n is 5-[N-(phenyl-2-ethyl)-carboxyamide]-2'-deoxyuridine
  misc_feature (18)..(18): n is 5-(N-benzylcarboxyamide)-2'-O-methyl-uridine
  misc_feature (19)..(19): n is 2'-O-methyl-adenosine
  misc_feature (20)..(20): n is 5-(N-benzylcarboxyamide)-2'-deoxyuridine
  misc_feature (21)..(21): n is 2'-O-methyl-adenosine
  misc_feature (24)..(24): n is 2'-O-methyl-guanosine
nnncngnnncnngcnnnnnnngcn

SEQ ID NO: 322 - DNA, 24 bp, Artificial Sequence
  Synthetic
  misc_feature (1)..(1): n is 5-[N-(4-fluorobenzyl)carboxyamide]-2'-deoxyuridine
  misc_feature (2)..(2): n is 5-(N-benzylcarboxyamide)-2'-deoxyuridine
  misc_feature (3)..(3): n is 2'-O-methyl-adenosine
  misc_feature (5)..(5): n is hexaethylene glycol
  misc_feature (7)..(8): n is 5-(N-benzylcarboxyamide)-2'-deoxyuridine
  misc_feature (9)..(9): n is 2'-deoxyadenosine-3'-phosphorothioate
  misc_feature (11)..(11): n is 1,3-propane diol
  misc_feature (12)..(12): n is 2'-O-methyl-cytidine
  misc_feature (15)..(15): n is 2'-deoxyguanosine-3'-phosphorothioate
  misc_feature (16)..(16): n is 5-(N-benzylcarboxyamide)-2'-deoxyuridine
  misc_feature (17)..(17): n is 5-[N-(phenyl-2-ethyl)-carboxyamide]-2'-deoxyuridine
  misc_feature (18)..(18): n is 5-(N-benzylcarboxyamide)-2'-O-methyl-uridine
  misc_feature (19)..(19): n is 2'-O-methyl-adenosine
  misc_feature (20)..(20): n is 5-(N-benzylcarboxyamide)-2'-deoxyuridine
  misc_feature (21)..(21): n is 2'-O-methyl-adenosine
  misc_feature (24)..(24): n is 2'-O-methyl-guanosine
nnncngnnncnngcnnnnnnngcn

SEQ ID NO: 323 - DNA, 24 bp, Artificial Sequence
  Synthetic
  misc_feature (1)..(1): n is 5-(N-benzylcarboxyamide)-2'-deoxyuridine
  misc_feature (2)..(2): n is 5-[N-(3,4-methylenedioxyphenyl-methyl)carboxyamide]-2'-deoxyuridi ne
  misc_feature (3)..(3): n is 2'-O-methyl-adenosine
  misc_feature (5)..(5): n is hexaethylene glycol
  misc_feature (7)..(8): n is 5-(N-benzylcarboxyamide)-2'-deoxyuridine
  misc_feature (9)..(9): n is 2'-deoxyadenosine-3'-phosphorothioate
  misc_feature (11)..(11): n is 1,3-propane diol
  misc_feature (12)..(12): n is 2'-O-methyl-cytidine
  misc_feature (15)..(15): n is 2'-deoxyguanosine-3'-phosphorothioate
  misc_feature (16)..(16): n is 5-(N-benzylcarboxyamide)-2'-deoxyuridine
  misc_feature (17)..(17): n is 5-[N-(phenyl-2-ethyl)-carboxyamide]-2'-deoxyuridine
  misc_feature (18)..(18): n is 5-(N-benzylcarboxyamide)-2'-O-methyl-uridine
  misc_feature (19)..(19): n is 2'-O-methyl-adenosine
  misc_feature (20)..(20): n is 5-(N-benzylcarboxyamide)-2'-deoxyuridine
  misc_feature (21)..(21): n is 2'-O-methyl-adenosine
  misc_feature (24)..(24): n is 2'-O-methyl-guanosine
nnncngnnncnngcnnnnnnngcn

SEQ ID NO: 324 - DNA, 24 bp, Artificial Sequence
  Synthetic
  misc_feature (1)..(1): n is 5-[N-(4-fluorobenzyl)carboxyamide]-2'-deoxyuridine
  misc_feature (2)..(2): n is 5-[N-(3,4-methylenedioxyphenyl-methyl)carboxyamide]-2'-deoxyuridi ne
  misc_feature (3)..(3): n is 2'-O-methyl-adenosine
  misc_feature (5)..(5): n is hexaethylene glycol
  misc_feature (7)..(8): n is 5-(N-benzylcarboxyamide)-2'-deoxyuridine
  misc_feature (9)..(9): n is 2'-deoxyadenosine-3'-phosphorothioate
  misc_feature (11)..(11): n is 1,3-propane diol
  misc_feature (12)..(12): n is 2'-O-methyl-cytidine
  misc_feature (15)..(15): n is 2'-deoxyguanosine-3'-phosphorothioate
  misc_feature (16)..(16): n is 5-(N-benzylcarboxyamide)-2'-deoxyuridine
  misc_feature (17)..(17): n is 5-[N-(phenyl-2-ethyl)-carboxyamide]-2'-deoxyuridine
  misc_feature (18)..(18): n is 5-(N-benzylcarboxyamide)-2'-O-methyl-uridine
  misc_feature (19)..(19): n is 2'-O-methyl-adenosine
  misc_feature (20)..(20): n is 5-(N-benzylcarboxyamide)-2'-deoxyuridine
  misc_feature (21)..(21): n is 2'-O-methyl-adenosine
  misc_feature (24)..(24): n is 2'-O-methyl-guanosine
nnncngnnncnngcnnnnnnngcn

SEQ ID NO: 325 - DNA, 24 bp, Artificial Sequence
  Synthetic
  misc_feature (1)..(1): n is 5-[N-(4-fluorobenzyl)carboxyamide]-2'-deoxyuridine
  misc_feature (2)..(2): n is 5-[N-(3,4-methylenedioxyphenyl-methyl)carboxyamide]-2'-deoxyuridi ne
  misc_feature (3)..(3): n is 2'-O-methyl-adenosine
  misc_feature (5)..(5): n is hexaethylene glycol
  misc_feature (7)..(7): n is 5-(N-benzylcarboxyamide)-2'-O-methyl-uridine
  misc_feature (8)..(8): n is 5-(N-benzylcarboxyamide)-2'-deoxyuridine
  misc_feature (9)..(9): n is 2'-deoxyadenosine-3'-phosphorothioate
  misc_feature (11)..(11): n is 1,3-propane diol
  misc_feature (12)..(12): n is 2'-O-methyl-cytidine
  misc_feature (15)..(15): n is 2'-deoxyguanosine-3'-phosphorothioate
  misc_feature (16)..(17): n is 5-(N-benzylcarboxyamide)-2'-deoxyuridine
  misc_feature (18)..(18): n is 5-(N-benzylcarboxyamide)-2'-O-methyl-uridine
  misc_feature (19)..(19): n is 2'-O-methyl-adenosine
  misc_feature (20)..(20): n is 5-(N-benzylcarboxyamide)-2'-deoxyuridine
  misc_feature (21)..(21): n is 2'-O-methyl-adenosine
  misc_feature (24)..(24): n is 2'-O-methyl-guanosine
nnncngnnncnngcnnnnnnngcn

SEQ ID NO: 326 - DNA, 24 bp, Artificial Sequence
  Synthetic
  misc_feature (1)..(1): n is 5-[N-(4-fluorobenzyl)carboxyamide]-2'-deoxyuridine
  misc_feature (2)..(2): n is 5-[N-(3,4-methylenedioxyphenyl-methyl)carboxyamide]-2'-deoxyuridi ne
  misc_feature (3)..(3): n is 2'-O-methyl-adenosine
  misc_feature (5)..(5): n is hexaethylene glycol
  misc_feature (7)..(7): n is 5-(N-benzylcarboxyamide)-2'-O-methyl-uridine
  misc_feature (8)..(8): n is 5-(N-benzylcarboxyamide)-2'-deoxyuridine
  misc_feature (9)..(9): n is 2'-deoxyadenosine-3'-phosphorothioate
  misc_feature (11)..(11): n is 2'-O-methyl-adenosine
  misc_feature (12)..(12): n is 2'-O-methyl-cytidine
  misc_feature (15)..(15): n is 2'-deoxyguanosine-3'-phosphorothioate
  misc_feature (16)..(17): n is 5-(N-benzylcarboxyamide)-2'-deoxyuridine
  misc_feature (18)..(18): n is 5-(N-benzylcarboxyamide)-2'-O-methyl-uridine
  misc_feature (19)..(19): n is 2'-O-methyl-adenosine
  misc_feature (20)..(20): n is 5-(N-benzylcarboxyamide)-2'-deoxyuridine
  misc_feature (21)..(21): n is 2'-O-methyl-adenosine
  misc_feature (24)..(24): n is 2'-O-methyl-guanosine
nnncngnnncnngcnnnnnnngcn

SEQ ID NO: 327 - DNA, 27 bp, Artificial Sequence
  Synthetic
  misc_feature (1)..(2): n is 5-(N-benzylcarboxyamide)-2'-deoxyuridine
  misc_feature (8)..(8): n is 5-(N-benzylcarboxyamide)-2'-deoxyuridine
  misc_feature (12)..(13): n is 5-(N-benzylcarboxyamide)-2'-deoxyuridine
  misc_feature (20)..(22): n is 5-(N-benzylcarboxyamide)-2'-deoxyuridine
  misc_feature (24)..(24): n is 5-(N-benzylcarboxyamide)-2'-deoxyuridine
nnacgacnacgnnacagcgnnnanagc

SEQ ID NO: 328 - DNA, 22 bp, Artificial Sequence
  Synthetic
  misc_feature (1)..(2): n is 5-(N-benzylcarboxyamide)-2'-deoxyuridine
  misc_feature (5)..(5): n is hexaethylene glycol
  misc_feature (7)..(8): n is 5-(N-benzylcarboxyamide)-2'-deoxyuridine
  misc_feature (15)..(17): n is 5-(N-benzylcarboxyamide)-2'-deoxyuridine
  misc_feature (19)..(19): n is 5-(N-benzylcarboxyamide)-2'-deoxyuridine
nnacngnnacagcgnnnanagc

SEQ ID NO: 329 - DNA, 22 bp, Artificial Sequence
  Synthetic
  misc_feature (1)..(2): n is 5-(N-benzylcarboxyamide)-2'-deoxyuridine
  misc_feature (5)..(5): n is hexaethylene glycol
  misc_feature (7)..(8): n is 5-(N-benzylcarboxyamide)-2'-deoxyuridine
  misc_feature (11)..(11): n is 1,3-propane diol
  misc_feature (15)..(17): n is 5-(N-benzylcarboxyamide)-2'-deoxyuridine
  misc_feature (19)..(19): n is 5-(N-benzylcarboxyamide)-2'-deoxyuridine
nnacngnnacngcgnnnanagc

SEQ ID NO: 330 - DNA, 24 bp, Artificial Sequence
  Synthetic
  misc_feature (1)..(1): n is 5-(N-benzylcarboxyamide)-2'-deoxyuridine
  misc_feature (2)..(2): n is 5-[N-(3,4-methylenedioxyphenyl-methyl)carboxyamide]-2'-deoxyuridi ne
  misc_feature (3)..(3): n is 2'-O-methyl-adenosine
  misc_feature (5)..(5): n is hexaethylene glycol
  misc_feature (7)..(7): n is 5-(N-benzylcarboxyamide)-2'-O-methyl-uridine
  misc_feature (8)..(8): n is 5-(N-benzylcarboxyamide)-2'-deoxyuridine
  misc_feature (11)..(11): n is 1,3-propane diol
  misc_feature (12)..(12): n is 2'-O-methyl-cytidine
  misc_feature (15)..(15): n is 2'-O-methyl-guanosine
  misc_feature (16)..(17): n is 5-(N-benzylcarboxyamide)-2'-deoxyuridine
  misc_feature (18)..(18): n is 5-(N-benzylcarboxyamide)-2'-O-methyl-uridine
  misc_feature (19)..(19): n is 2'-O-methyl-adenosine
  misc_feature (20)..(20): n is 5-(N-benzylcarboxyamide)-2'-deoxyuridine
  misc_feature (21)..(21): n is 2'-O-methyl-adenosine
  misc_feature (24)..(24): n is 2'-O-methyl-guanosine
nnncngnnacnngcnnnnnnngcn

SEQ ID NO: 331 - DNA, 24 bp, Artificial Sequence
  Synthetic
  misc_feature (1)..(1): n is 5-(N-benzylcarboxyamide)-2'-deoxyuridine
  misc_feature (2)..(2): n is 5-[N-(3,4-methylenedioxyphenyl-methyl)carboxyamide]-2'-deoxyuridi ne
  misc_feature (3)..(3): n is 2'-O-methyl-adenosine
  misc_feature (5)..(5): n is hexaethylene glycol
  misc_feature (7)..(7): n is 5-(N-benzylcarboxyamide)-2'-O-methyl-uridine
  misc_feature (8)..(8): n is 5-(N-benzylcarboxyamide)-2'-deoxyuridine
  misc_feature (11)..(11): n is 1,3-propane diol
  misc_feature (12)..(12): n is 2'-O-methyl-cytidine
  misc_feature (15)..(15): n is 2'-O-methyl-guanosine
  misc_feature (16)..(16): n is 5-[N-(1-naphthylmethyl)carboxyamide]-2'-deoxyuridine
  misc_feature (17)..(17): n is 5-(N-benzylcarboxyamide)-2'-deoxyuridine
  misc_feature (18)..(18): n is 5-(N-benzylcarboxyamide)-2'-O-methyl-uridine
  misc_feature (19)..(19): n is 2'-O-methyl-adenosine
  misc_feature (20)..(20): n is 5-(N-benzylcarboxyamide)-2'-deoxyuridine
  misc_feature (21)..(21): n is 2'-O-methyl-adenosine
  misc_feature (24)..(24): n is 2'-O-methyl-guanosine
nnncngnnacnngcnnnnnnngcn

SEQ ID NO: 332 - DNA, 24 bp, Artificial Sequence
  Synthetic
  misc_feature (1)..(1): n is 5-(N-benzylcarboxyamide)-2'-deoxyuridine
  misc_feature (2)..(2): n is 5-[N-(3,4-methylenedioxyphenyl-methyl)carboxyamide]-2'-deoxyuridi ne
  misc_feature (3)..(3): n is 2'-O-methyl-adenosine
  misc_feature (5)..(5): n is hexaethylene glycol
  misc_feature (7)..(7): n is 5-(N-benzylcarboxyamide)-2'-O-methyl-uridine
  misc_feature (8)..(8): n is 5-(N-benzylcarboxyamide)-2'-deoxyuridine
  misc_feature (11)..(11): n is 1,3-propane diol
  misc_feature (12)..(12): n is 2'-O-methyl-cytidine
  misc_feature (15)..(15): n is 2'-O-methyl-guanosine
  misc_feature (16)..(16): n is 5-[N-(2-naphthylmethyl)carboxyamide]-2'-deoxyuridine
  misc_feature (17)..(17): n is 5-(N-benzylcarboxyamide)-2'-deoxyuridine
  misc_feature (18)..(18): n is 5-(N-benzylcarboxyamide)-2'-O-methyl-uridine
  misc_feature (19)..(19): n is 2'-O-methyl-adenosine
  misc_feature (20)..(20): n is 5-(N-benzylcarboxyamide)-2'-deoxyuridine
  misc_feature (21)..(21): n is 2'-O-methyl-adenosine
  misc_feature (24)..(24): n is 2'-O-methyl-guanosine
nnncngnnacnngcnnnnnnngcn

SEQ ID NO: 333 - DNA, 24 bp, Artificial Sequence
  Synthetic
  misc_feature (1)..(1): n is 5-(N-benzylcarboxyamide)-2'-deoxyuridine
  misc_feature (2)..(2): n is 5-[N-(3,4-methylenedioxyphenyl-methyl)carboxyamide]-2'-deoxyuridi ne
  misc_feature (3)..(3): n is 2'-O-methyl-adenosine
  misc_feature (5)..(5): n is hexaethylene glycol
  misc_feature (7)..(7): n is 5-(N-benzylcarboxyamide)-2'-O-methyl-uridine
  misc_feature (8)..(8): n is 5-(N-benzylcarboxyamide)-2'-deoxyuridine
  misc_feature (11)..(11): n is 1,3-propane diol
  misc_feature (12)..(12): n is 2'-O-methyl-cytidine
  misc_feature (13)..(13): n is 2'-O-methyl-guanosine
  misc_feature (16)..(17): n is 5-(N-benzylcarboxyamide)-2'-deoxyuridine
  misc_feature (18)..(18): n is 5-(N-benzylcarboxyamide)-2'-O-methyl-uridine
  misc_feature (19)..(19): n is 2'-O-methyl-adenosine
  misc_feature (20)..(20): n is 5-(N-benzylcarboxyamide)-2'-deoxyuridine
  misc_feature (21)..(21): n is 2'-O-methyl-adenosine
  misc_feature (24)..(24): n is 2'-O-methyl-guanosine
nnncngnnacnnncgnnnnnngcn

SEQ ID NO: 334 - DNA, 24 bp, Artificial Sequence
  Synthetic
  misc_feature (1)..(1): n is 5-(N-benzylcarboxyamide)-2'-deoxyuridine
  misc_feature (2)..(2): n is 5-[N-(3,4-methylenedioxyphenyl-methyl)carboxyamide]-2'-deoxyuridi ne
  misc_feature (3)..(3): n is 2'-O-methyl-adenosine
  misc_feature (5)..(5): n is hexaethylene glycol
  misc_feature (7)..(7): n is 5-(N-benzylcarboxyamide)-2'-O-methyl-uridine
  misc_feature (8)..(8): n is 5-(N-benzylcarboxyamide)-2'-deoxyuridine
  misc_feature (11)..(11): n is 1,3-propane diol
  misc_feature (12)..(12): n is 2'-O-methyl-cytidine
  misc_feature (13)..(13): n is 2'-O-methyl-guanosine
  misc_feature (15)..(15): n is 2'-O-methyl-guanosine
  misc_feature (16)..(17): n is 5-(N-benzylcarboxyamide)-2'-deoxyuridine
  misc_feature (18)..(18): n is 5-(N-benzylcarboxyamide)-2'-O-methyl-uridine
  misc_feature (19)..(19): n is 2'-O-methyl-adenosine
  misc_feature (20)..(20): n is 5-(N-benzylcarboxyamide)-2'-deoxyuridine
  misc_feature (21)..(21): n is 2'-O-methyl-adenosine
  misc_feature (24)..(24): n is 2'-O-methyl-guanosine
nnncngnnacnnncnnnnnnngcn

SEQ ID NO: 335 - DNA, 24 bp, Artificial Sequence
  Synthetic
  misc_feature (1)..(1): n is 5-(N-benzylcarboxyamide)-2'-deoxyuridine
  misc_feature (2)..(2): n is 5-[N-(3,4-methylenedioxyphenyl-methyl)carboxyamide]-2'-deoxyuridi ne
  misc_feature (3)..(3): n is 2'-O-methyl-adenosine
  misc_feature (5)..(5): n is hexaethylene glycol
  misc_feature (7)..(7): n is 5-(N-benzylcarboxyamide)-2'-O-methyl-uridine
  misc_feature (8)..(8): n is 5-(N-benzylcarboxyamide)-2'-deoxyuridine
  misc_feature (11)..(11): n is 1,3-propane diol
  misc_feature (12)..(12): n is 2'-O-methyl-cytidine
  misc_feature (13)..(13): n is 2'-O-methyl-guanosine
  misc_feature (16)..(16): n is 5-[N-(1-naphthylmethyl)carboxyamide]-2'-deoxyuridine
  misc_feature (17)..(17): n is 5-(N-benzylcarboxyamide)-2'-deoxyuridine
  misc_feature (18)..(18): n is 5-(N-benzylcarboxyamide)-2'-O-methyl-uridine
  misc_feature (19)..(19): n is 2'-O-methyl-adenosine
  misc_feature (20)..(20): n is 5-(N-benzylcarboxyamide)-2'-deoxyuridine
  misc_feature (21)..(21): n is 2'-O-methyl-adenosine
  misc_feature (24)..(24): n is 2'-O-methyl-guanosine
nnncngnnacnnncgnnnnnngcn

SEQ ID NO: 336 - DNA, 24 bp, Artificial Sequence
  Synthetic
  misc_feature (1)..(1): n is 5-(N-benzylcarboxyamide)-2'-deoxyuridine
  misc_feature (2)..(2): n is 5-[N-(3,4-methylenedioxyphenyl-methyl)carboxyamide]-2'-deoxyuridi ne
  misc_feature (3)..(3): n is 2'-O-methyl-adenosine
  misc_feature (5)..(5): n is hexaethylene glycol
  misc_feature (7)..(7): n is 5-(N-benzylcarboxyamide)-2'-O-methyl-uridine
  misc_feature (8)..(8): n is 5-(N-benzylcarboxyamide)-2'-deoxyuridine
  misc_feature (11)..(11): n is 1,3-propane diol
  misc_feature (12)..(12): n is 2'-O-methyl-cytidine
  misc_feature (13)..(13): n is 2'-O-methyl-guanosine
  misc_feature (14)..(14): n is 2'-O-methyl-cytidine
  misc_feature (16)..(17): n is 5-(N-benzylcarboxyamide)-2'-deoxyuridine
  misc_feature (18)..(18): n is 5-(N-benzylcarboxyamide)-2'-O-methyl-uridine
  misc_feature (19)..(19): n is 2'-O-methyl-adenosine
  misc_feature (20)..(20): n is 5-(N-benzylcarboxyamide)-2'-deoxyuridine
  misc_feature (21)..(21): n is 2'-O-methyl-adenosine
  misc_feature (24)..(24): n is 2'-O-methyl-guanosine
nnncngnnacnnnngnnnnnngcn

SEQ ID NO: 337 - DNA, 24 bp, Artificial Sequence
  Synthetic
  misc_feature (1)..(1): n is 5-(N-benzylcarboxyamide)-2'-deoxyuridine
  misc_feature (2)..(2): n is 5-[N-(3,4-methylenedioxyphenyl-methyl)carboxyamide]-2'-deoxyuridi ne
  misc_feature (3)..(3): n is 2'-O-methyl-adenosine
  misc_feature (5)..(5): n is hexaethylene glycol
  misc_feature (7)..(7): n is 5-(N-benzylcarboxyamide)-2'-O-methyl-uridine
  misc_feature (8)..(8): n is 5-(N-benzylcarboxyamide)-2'-deoxyuridine
  misc_feature (9)..(9): n is 2'-O-methyl-adenosine
  misc_feature (11)..(11): n is 1,3-propane diol
  misc_feature (12)..(12): n is 2'-O-methyl-cytidine
  misc_feature (16)..(17): n is 5-(N-benzylcarboxyamide)-2'-deoxyuridine
  misc_feature (18)..(18): n is 5-(N-benzylcarboxyamide)-2'-O-methyl-uridine
  misc_feature (19)..(19): n is 2'-O-methyl-adenosine
  misc_feature (20)..(20): n is 5-(N-benzylcarboxyamide)-2'-deoxyuridine
  misc_feature (21)..(21): n is 2'-O-methyl-adenosine
  misc_feature (24)..(24): n is 2'-O-methyl-guanosine
nnncngnnncnngcgnnnnnngcn

SEQ ID NO: 338 - DNA, 24 bp, Artificial Sequence
  Synthetic
  misc_feature (1)..(1): n is 5-(N-benzylcarboxyamide)-2'-deoxyuridine
  misc_feature (2)..(2): n is 5-[N-(3,4-methylenedioxyphenyl-methyl)carboxyamide]-2'-deoxyuridi ne
  misc_feature (3)..(3): n is 2'-O-methyl-adenosine
  misc_feature (5)..(5): n is hexaethylene glycol
  misc_feature (7)..(7): n is 5-(N-benzylcarboxyamide)-2'-O-methyl-uridine
  misc_feature (8)..(8): n is 5-(N-benzylcarboxyamide)-2'-deoxyuridine
  misc_feature (9)..(9): n is 2'-deoxyadenosine-3'-phosphorothioate
  misc_feature (11)..(11): n is 1,3-propane diol
  misc_feature (12)..(12): n is 2'-O-methyl-cytidine
  misc_feature (15)..(15): n is 2'-deoxyguanosine-3'-phosphorothioate
  misc_feature (16)..(16): n is 5-[N-(1-naphthylmethyl)carboxyamide]-2'-deoxyuridine
  misc_feature (17)..(17): n is 5-(N-benzylcarboxyamide)-2'-deoxyuridine-3'-phosphorothioate
  misc_feature (18)..(18): n is 5-(N-benzylcarboxyamide)-2'-O-methyl-uridine
  misc_feature (19)..(19): n is 2'-O-methyl-adenosine
  misc_feature (20)..(20): n is 5-(N-benzylcarboxyamide)-2'-deoxyuridine
  misc_feature (21)..(21): n is 2'-O-methyl-adenosine
  misc_feature (24)..(24): n is 2'-O-methyl-guanosine
nnncngnnncnngcnnnnnnngcn

SEQ ID NO: 339 - DNA, 24 bp, Artificial Sequence
  Synthetic
  misc_feature (1)..(1): n is 5-(N-benzylcarboxyamide)-2'-deoxyuridine
  misc_feature (2)..(2): n is 5-[N-(3,4-methylenedioxyphenyl-methyl)carboxyamide]-2'-deoxyuridi ne
  misc_feature (3)..(3): n is 2'-O-methyl-adenosine
  misc_feature (5)..(5): n is hexaethylene glycol
  misc_feature (7)..(7): n is 5-(N-benzylcarboxyamide)-2'-O-methyl-uridine
  misc_feature (8)..(8): n is 5-(N-benzylcarboxyamide)-2'-deoxyuridine
  misc_feature (9)..(9): n is 2'-deoxyadenosine-3'-phosphorothioate
  misc_feature (11)..(11): n is 1,3-propane diol
  misc_feature (12)..(12): n is 2'-O-methyl-cytidine
  misc_feature (15)..(15): n is 2'-deoxyguanosine-3'-phosphorothioate
  misc_feature (16)..(16): n is 5-(N-benzylcarboxyamide)-2'-deoxyuridine
  misc_feature (17)..(17): n is 5-(N-benzylcarboxyamide)-2'-deoxyuridine-3'-phosphorothioate
  misc_feature (18)..(18): n is 5-(N-benzylcarboxyamide)-2'-O-methyl-uridine
  misc_feature (19)..(19): n is 2'-O-methyl-adenosine
  misc_feature (20)..(20): n is 5-(N-benzylcarboxyamide)-2'-deoxyuridine
  misc_feature (21)..(21): n is 2'-O-methyl-adenosine
  misc_feature (24)..(24): n is 2'-O-methyl-guanosine
nnncngnnncnngcnnnnnnngcn

SEQ ID NO: 340 - DNA, 24 bp, Artificial Sequence
  Synthetic
  misc_feature (1)..(1): n is 5-(N-benzylcarboxyamide)-2'-deoxyuridine
  misc_feature (2)..(2): n is 5-[N-(3,4-methylenedioxyphenyl-methyl)carboxyamide]-2'-deoxyuridi ne
  misc_feature (3)..(3): n is 2'-O-methyl-adenosine
  misc_feature (5)..(5): n is hexaethylene glycol
  misc_feature (7)..(7): n is 5-(N-benzylcarboxyamide)-2'-O-methyl-uridine
  misc_feature (8)..(8): n is 5-(N-benzylcarboxyamide)-2'-deoxyuridine
  misc_feature (9)..(9): n is 2'-deoxyadenosine-3'-phosphorothioate
  misc_feature (11)..(11): n is 1,3-propane diol
  misc_feature (12)..(12): n is 2'-O-methyl-cytidine
  misc_feature (15)..(15): n is 2'-deoxyguanosine-3'-phosphorothioate
  misc_feature (16)..(16): n is 5-[N-(1-naphthylmethyl)carboxyamide]-2'-deoxyuridine
  misc_feature (17)..(17): n is 5-(N-benzylcarboxyamide)-2'-deoxyuridine
  misc_feature (18)..(18): n is 5-(N-benzylcarboxyamide)-2'-O-methyl-uridine
  misc_feature (19)..(19): n is 2'-O-methyl-adenosine
  misc_feature (20)..(20): n is 5-(N-benzylcarboxyamide)-2'-deoxyuridine
  misc_feature (21)..(21): n is 2'-O-methyl-adenosine
  misc_feature (24)..(24): n is 2'-O-methyl-guanosine
nnncngnnncnngcnnnnnnngcn

SEQ ID NO: 341 - DNA, 24 bp, Artificial Sequence
  Synthetic
  misc_feature (1)..(1): n is 5-(N-benzylcarboxyamide)-2'-deoxyuridine
  misc_feature (2)..(2): n is 5-[N-(3,4-methylenedioxyphenyl-methyl)carboxyamide]-2'-deoxyuridi ne
  misc_feature (3)..(3): n is 2'-O-methyl-adenosine
  misc_feature (5)..(5): n is hexaethylene glycol
  misc_feature (7)..(7): n is 5-(N-benzylcarboxyamide)-2'-O-methyl-uridine
  misc_feature (8)..(8): n is 5-(N-benzylcarboxyamide)-2'-deoxyuridine
  misc_feature (9)..(9): n is 2'-deoxyadenosine-3'-phosphorothioate
  misc_feature (11)..(11): n is 1,3-propane diol
  misc_feature (12)..(12): n is 2'-O-methyl-cytidine
  misc_feature (15)..(15): n is 2'-deoxyguanosine-3'-phosphorothioate
  misc_feature (16)..(17): n is 5-(N-benzylcarboxyamide)-2'-deoxyuridine
  misc_feature (18)..(18): n is 5-(N-benzylcarboxyamide)-2'-O-methyl-uridine
  misc_feature (19)..(19): n is 2'-O-methyl-adenosine
  misc_feature (20)..(20): n is 5-(N-benzylcarboxyamide)-2'-deoxyuridine
  misc_feature (21)..(21): n is 2'-O-methyl-adenosine
  misc_feature (24)..(24): n is 2'-O-methyl-guanosine
nnncngnnncnngcnnnnnnngcn

SEQ ID NO: 342 - DNA, 24 bp, Artificial Sequence
  Synthetic
  misc_feature (1)..(2): n is 5-(N-benzylcarboxyamide)-2'-deoxyuridine
  misc_feature (3)..(3): n is 2'-O-methyl-adenosine
  misc_feature (5)..(5): n is hexaethylene glycol
  misc_feature (7)..(7): n is 5-(N-benzylcarboxyamide)-2'-O-methyl-uridine
  misc_feature (8)..(8): n is 5-(N-benzylcarboxyamide)-2'-deoxyuridine
  misc_feature (9)..(9): n is 2'-deoxyadenosine-3'-phosphorothioate
  misc_feature (11)..(11): n is 1,3-propane diol
  misc_feature (12)..(12): n is 2'-O-methyl-cytidine
  misc_feature (15)..(15): n is 2'-deoxyguanosine-3'-phosphorothioate
  misc_feature (16)..(16): n is 5-[N-(1-naphthylmethyl)carboxyamide]-2'-deoxyuridine
  misc_feature (17)..(17): n is 5-(N-benzylcarboxyamide)-2'-deoxyuridine-3'-phosphorothioate
  misc_feature (18)..(18): n is 5-(N-benzylcarboxyamide)-2'-O-methyl-uridine
  misc_feature (19)..(19): n is 2'-O-methyl-adenosine
  misc_feature (20)..(20): n is 5-(N-benzylcarboxyamide)-2'-deoxyuridine
  misc_feature (21)..(21): n is 2'-O-methyl-adenosine
  misc_feature (24)..(24): n is 2'-O-methyl-guanosine
nnncngnnncnngcnnnnnnngcn

SEQ ID NO: 343 - DNA, 24 bp, Artificial Sequence
  Synthetic
  misc_feature (1)..(2): n is 5-(N-benzylcarboxyamide)-2'-deoxyuridine
  misc_feature (3)..(3): n is 2'-O-methyl-adenosine
  misc_feature (5)..(5): n is hexaethylene glycol
  misc_feature (7)..(7): n is 5-(N-benzylcarboxyamide)-2'-O-methyl-uridine
  misc_feature (8)..(8): n is 5-(N-benzylcarboxyamide)-2'-deoxyuridine
  misc_feature (9)..(9): n is 2'-deoxyadenosine-3'-phosphorothioate
  misc_feature (11)..(11): n is 1,3-propane diol
  misc_feature (12)..(12): n is 2'-O-methyl-cytidine
  misc_feature (15)..(15): n is 2'-deoxyguanosine-3'-phosphorothioate
  misc_feature (16)..(16): n is 5-(N-benzylcarboxyamide)-2'-deoxyuridine
  misc_feature (17)..(17): n is 5-(N-benzylcarboxyamide)-2'-deoxyuridine-3'-phosphorothioate
  misc_feature (18)..(18): n is 5-(N-benzylcarboxyamide)-2'-O-methyl-uridine
  misc_feature (19)..(19): n is 2'-O-methyl-adenosine
  misc_feature (20)..(20): n is 5-(N-benzylcarboxyamide)-2'-deoxyuridine
  misc_feature (21)..(21): n is 2'-O-methyl-adenosine
  misc_feature (24)..(24): n is 2'-O-methyl-guanosine
nnncngnnncnngcnnnnnnngcn

SEQ ID NO: 344 - DNA, 24 bp, Artificial Sequence
  Synthetic
  misc_feature (1)..(2): n is 5-(N-benzylcarboxyamide)-2'-deoxyuridine
  misc_feature (3)..(3): n is 2'-O-methyl-adenosine
  misc_feature (5)..(5): n is hexaethylene glycol
  misc_feature (7)..(7): n is 5-(N-benzylcarboxyamide)-2'-O-methyl-uridine
  misc_feature (8)..(8): n is 5-(N-benzylcarboxyamide)-2'-deoxyuridine
  misc_feature (9)..(9): n is 2'-deoxyadenosine-3'-phosphorothioate
  misc_feature (11)..(11): n is 1,3-propane diol
  misc_feature (12)..(12): n is 2'-O-methyl-cytidine
  misc_feature (15)..(15): n is 2'-deoxyguanosine-3'-phosphorothioate
  misc_feature (16)..(16): n is 5-[N-(1-naphthylmethyl)carboxyamide]-2'-deoxyuridine
  misc_feature (17)..(17): n is 5-(N-benzylcarboxyamide)-2'-deoxyuridine
  misc_feature (18)..(18): n is 5-(N-benzylcarboxyamide)-2'-O-methyl-uridine
  misc_feature (19)..(19): n is 2'-O-methyl-adenosine
  misc_feature (20)..(20): n is 5-(N-benzylcarboxyamide)-2'-deoxyuridine
  misc_feature (21)..(21): n is 2'-O-methyl-adenosine
  misc_feature (24)..(24): n is 2'-O-methyl-guanosine
nnncngnnncnngcnnnnnnngcn

SEQ ID NO: 345 - DNA, 42 bp, Artificial Sequence
  Synthetic
  misc_feature (5)..(5): n is 5-(N-benzylcarboxyamide)-2'-deoxyuridine
  misc_feature (9)..(10): n is 5-(N-benzylcarboxyamide)-2'-deoxyuridine
  misc_feature (18)..(20): n is 5-(N-benzylcarboxyamide)-2'-deoxyuridine
  misc_feature (22)..(22): n is 5-(N-benzylcarboxyamide)-2'-deoxyuridine
  misc_feature (27)..(27): n is 5-(N-benzylcarboxyamide)-2'-deoxyuridine
  misc_feature (37)..(37): n is 5-(N-benzylcarboxyamide)-2'-deoxyuridine
cgacnacgnnacacgcgnnnanagcgncaacccgagngaaca

SEQ ID NO: 346 - DNA, 40 bp, Artificial Sequence
  Synthetic
  misc_feature (3)..(3): n is 5-(N-benzylcarboxyamide)-2'-deoxyuridine
  misc_feature (7)..(8): n is 5-(N-benzylcarboxyamide)-2'-deoxyuridine
  misc_feature (16)..(18): n is 5-(N-benzylcarboxyamide)-2'-deoxyuridine
  misc_feature (20)..(20): n is 5-(N-benzylcarboxyamide)-2'-deoxyuridine
  misc_feature (25)..(25): n is 5-(N-benzylcarboxyamide)-2'-deoxyuridine
  misc_feature (35)..(35): n is 5-(N-benzylcarboxyamide)-2'-deoxyuridine
acnacgnnacacgcgnnnanagcgncaacccgagngaaca

SEQ ID NO: 347 - DNA, 38 bp, Artificial Sequence
  Synthetic
  misc_feature (1)..(1): n is 5-(N-benzylcarboxyamide)-2'-deoxyuridine
  misc_feature (5)..(6): n is 5-(N-benzylcarboxyamide)-2'-deoxyuridine
  misc_feature (14)..(16): n is 5-(N-benzylcarboxyamide)-2'-deoxyuridine
  misc_feature (18)..(18): n is 5-(N-benzylcarboxyamide)-2'-deoxyuridine
  misc_feature (23)..(23): n is 5-(N-benzylcarboxyamide)-2'-deoxyuridine
  misc_feature (33)..(33): n is 5-(N-benzylcarboxyamide)-2'-deoxyuridine
nacgnnacacgcgnnnanagcgncaacccgagngaaca

SEQ ID NO: 348 - DNA, 36 bp, Artificial Sequence
  Synthetic
  misc_feature (3)..(4): n is 5-(N-benzylcarboxyamide)-2'-deoxyuridine
  misc_feature (12)..(14): n is 5-(N-benzylcarboxyamide)-2'-deoxyuridine
  misc_feature (16)..(16): n is 5-(N-benzylcarboxyamide)-2'-deoxyuridine
  misc_feature (21)..(21): n is 5-(N-benzylcarboxyamide)-2'-deoxyuridine
  misc_feature (31)..(31): n is 5-(N-benzylcarboxyamide)-2'-deoxyuridine
cgnnacacgcgnnnanagcgncaacccgagngaaca

SEQ ID NO: 349 - DNA, 34 bp, Artificial Sequence
  Synthetic
  misc_feature (1)..(2): n is 5-(N-benzylcarboxyamide)-2'-deoxyuridine
  misc_feature (10)..(12): n is 5-(N-benzylcarboxyamide)-2'-deoxyuridine
  misc_feature (14)..(14): n is 5-(N-benzylcarboxyamide)-2'-deoxyuridine
  misc_feature (19)..(19): n is 5-(N-benzylcarboxyamide)-2'-deoxyuridine
  misc_feature (29)..(29): n is 5-(N-benzylcarboxyamide)-2'-deoxyuridine
nnacacgcgnnnanagcgncaacccgagngaaca

SEQ ID NO: 350 - DNA, 32 bp, Artificial Sequence
  Synthetic
  misc_feature (8)..(10): n is 5-(N-benzylcarboxyamide)-2'-deoxyuridine
  misc_feature (12)..(12): n is 5-(N-benzylcarboxyamide)-2'-deoxyuridine
  misc_feature (17)..(17): n is 5-(N-benzylcarboxyamide)-2'-deoxyuridine
  misc_feature (27)..(27): n is 5-(N-benzylcarboxyamide)-2'-deoxyuridine
acacgcgnnnanagcgncaacccgagngaaca

SEQ ID NO: 351 - DNA, 27 bp, Artificial Sequence
  Synthetic
  misc_feature (2)..(3): n is 5-(N-benzylcarboxyamide)-2'-deoxyuridine
  misc_feature (9)..(9): n is 5-(N-benzylcarboxyamide)-2'-deoxyuridine
  misc_feature (13)..(14): n is 5-(N-benzylcarboxyamide)-2'-deoxyuridine
  misc_feature (22)..(24): n is 5-(N-benzylcarboxyamide)-2'-deoxyuridine
  misc_feature (26)..(26): n is 5-(N-benzylcarboxyamide)-2'-deoxyuridine
cnnacgacnacgnnacacgcgnnnana

SEQ ID NO: 352 - DNA, 26 bp, Artificial Sequence
  Synthetic
  misc_feature (2)..(3): n is 5-(N-benzylcarboxyamide)-2'-deoxyuridine
  misc_feature (9)..(9): n is 5-(N-benzylcarboxyamide)-2'-deoxyuridine
  misc_feature (13)..(14): n is 5-(N-benzylcarboxyamide)-2'-deoxyuridine
  misc_feature (22)..(24): n is 5-(N-benzylcarboxyamide)-2'-deoxyuridine
cnnacgacnacgnnacacgcgnnnat

SEQ ID NO: 353 - DNA, 25 bp, Artificial Sequence
  Synthetic
  misc_feature (2)..(3): n is 5-(N-benzylcarboxyamide)-2'-deoxyuridine
  misc_feature (9)..(9): n is 5-(N-benzylcarboxyamide)-2'-deoxyuridine
  misc_feature (13)..(14): n is 5-(N-benzylcarboxyamide)-2'-deoxyuridine
  misc_feature (22)..(24): n is 5-(N-benzylcarboxyamide)-2'-deoxyuridine
cnnacgacnacgnnacacgcgnnna

SEQ ID NO: 354 - DNA, 26 bp, Artificial Sequence
  Synthetic
  misc_feature (1)..(2): n is 5-(N-benzylcarboxyamide)-2'-deoxyuridine
  misc_feature (8)..(8): n is 5-(N-benzylcarboxyamide)-2'-deoxyuridine
  misc_feature (12)..(13): n is 5-(N-benzylcarboxyamide)-2'-deoxyuridine
  misc_feature (21)..(23): n is 5-(N-benzylcarboxyamide)-2'-deoxyuridine
  misc_feature (25)..(25): n is 5-(N-benzylcarboxyamide)-2'-deoxyuridine
nnacgacnacgnnacacgcgnnnana

SEQ ID NO: 355 - DNA, 25 bp, Artificial Sequence
  Synthetic
  misc_feature (1)..(2): n is 5-(N-benzylcarboxyamide)-2'-deoxyuridine
  misc_feature (8)..(8): n is 5-(N-benzylcarboxyamide)-2'-deoxyuridine
  misc_feature (12)..(13): n is 5-(N-benzylcarboxyamide)-2'-deoxyuridine
  misc_feature (21)..(23): n is 5-(N-benzylcarboxyamide)-2'-deoxyuridine
nnacgacnacgnnacacgcgnnnat

SEQ ID NO: 356 - DNA, 24 bp, Artificial Sequence
  Synthetic
  misc_feature (1)..(2): n is 5-(N-benzylcarboxyamide)-2'-deoxyuridine
  misc_feature (8)..(8): n is 5-(N-benzylcarboxyamide)-2'-deoxyuridine
  misc_feature (12)..(13): n is 5-(N-benzylcarboxyamide)-2'-deoxyuridine
  misc_feature (21)..(23): n is 5-(N-benzylcarboxyamide)-2'-deoxyuridine
nnacgacnacgnnacacgcgnnna

SEQ ID NO: 357 - DNA, 29 bp, Artificial Sequence
  Synthetic
  misc_feature (1)..(1): n is 5-(N-benzylcarboxyamide)-2'-deoxyuridine
  misc_feature (2)..(2): n is 1,3-propane diol
  misc_feature (8)..(8): n is 5-(N-benzylcarboxyamide)-2'-deoxyuridine
  misc_feature (12)..(13): n is 5-(N-benzylcarboxyamide)-2'-deoxyuridine
  misc_feature (21)..(23): n is 5-(N-benzylcarboxyamide)-2'-deoxyuridine
  misc_feature (25)..(25): n is 5-(N-benzylcarboxyamide)-2'-deoxyuridine
nnacgacnacgnnacacgcgnnnanagcg

SEQ ID NO: 358 - DNA, 29 bp, Artificial Sequence
  Synthetic
  misc_feature (1)..(2): n is 5-(N-benzylcarboxyamide)-2'-deoxyuridine
  misc_feature (3)..(3): n is 1,3-propane diol
  misc_feature (8)..(8): n is 5-(N-benzylcarboxyamide)-2'-deoxyuridine
  misc_feature (12)..(13): n is 5-(N-benzylcarboxyamide)-2'-deoxyuridine
  misc_feature (21)..(23): n is 5-(N-benzylcarboxyamide)-2'-deoxyuridine
  misc_feature (25)..(25): n is 5-(N-benzylcarboxyamide)-2'-deoxyuridine
nnncgacnacgnnacacgcgnnnanagcg

SEQ ID NO: 359 - DNA, 29 bp, Artificial Sequence
  Synthetic
  misc_feature (1)..(2): n is 5-(N-benzylcarboxyamide)-2'-deoxyuridine
  misc_feature (8)..(8): n is 5-(N-benzylcarboxyamide)-2'-deoxyuridine
  misc_feature (11)..(11): n is 1,3-propane diol
  misc_feature (12)..(13): n is 5-(N-benzylcarboxyamide)-2'-deoxyuridine
  misc_feature (21)..(23): n is 5-(N-benzylcarboxyamide)-2'-deoxyuridine
  misc_feature (25)..(25): n is 5-(N-benzylcarboxyamide)-2'-deoxyuridine
nnacgacnacnnnacacgcgnnnanagcg

SEQ ID NO: 360 - DNA, 29 bp, Artificial Sequence
  Synthetic
  misc_feature (1)..(2): n is 5-(N-benzylcarboxyamide)-2'-deoxyuridine
  misc_feature (8)..(8): n is 5-(N-benzylcarboxyamide)-2'-deoxyuridine
  misc_feature (12)..(12): n is 1,3-propane diol
  misc_feature (13)..(13): n is 5-(N-benzylcarboxyamide)-2'-deoxyuridine
  misc_feature (21)..(23): n is 5-(N-benzylcarboxyamide)-2'-deoxyuridine
  misc_feature (25)..(25): n is 5-(N-benzylcarboxyamide)-2'-deoxyuridine
nnacgacnacgnnacacgcgnnnanagcg

SEQ ID NO: 361 - DNA, 29 bp, Artificial Sequence
  Synthetic
  misc_feature (1)..(2): n is 5-(N-benzylcarboxyamide)-2'-deoxyuridine
  misc_feature (8)..(8): n is 5-(N-benzylcarboxyamide)-2'-deoxyuridine
  misc_feature (12)..(12): n is 5-(N-benzylcarboxyamide)-2'-deoxyuridine
  misc_feature (13)..(13): n is 1,3-propane diol
  misc_feature (21)..(23): n is 5-(N-benzylcarboxyamide)-2'-deoxyuridine
  misc_feature (25)..(25): n is 5-(N-benzylcarboxyamide)-2'-deoxyuridine
nnacgacnacgnnacacgcgnnnanagcg

SEQ ID NO: 362 - DNA, 29 bp, Artificial Sequence
  Synthetic
  misc_feature (1)..(2): n is 5-(N-benzylcarboxyamide)-2'-deoxyuridine
  misc_feature (8)..(8): n is 5-(N-benzylcarboxyamide)-2'-deoxyuridine
  misc_feature (12)..(13): n is 5-(N-benzylcarboxyamide)-2'-deoxyuridine
  misc_feature (14)..(14): n is 1,3-propane diol
  misc_feature (21)..(23): n is 5-(N-benzylcarboxyamide)-2'-deoxyuridine
  misc_feature (25)..(25): n is 5-(N-benzylcarboxyamide)-2'-deoxyuridine
nnacgacnacgnnncacgcgnnnanagcg

SEQ ID NO: 363 - DNA, 29 bp, Artificial Sequence
  Synthetic
  misc_feature (1)..(2): n is 5-(N-benzylcarboxyamide)-2'-deoxyuridine
  misc_feature (8)..(8): n is 5-(N-benzylcarboxyamide)-2'-deoxyuridine
  misc_feature (12)..(13): n is 5-(N-benzylcarboxyamide)-2'-deoxyuridine
  misc_feature (18)..(18): n is 1,3-propane diol
  misc_feature (21)..(23): n is 5-(N-benzylcarboxyamide)-2'-deoxyuridine
  misc_feature (25)..(25): n is 5-(N-benzylcarboxyamide)-2'-deoxyuridine
nnacgacnacgnnacacncgnnnanagcg

SEQ ID NO: 364 - DNA, 29 bp, Artificial Sequence
  Synthetic
  misc_feature (1)..(2): n is 5-(N-benzylcarboxyamide)-2'-deoxyuridine
  misc_feature (8)..(8): n is 5-(N-benzylcarboxyamide)-2'-deoxyuridine
  misc_feature (12)..(13): n is 5-(N-benzylcarboxyamide)-2'-deoxyuridine
  misc_feature (19)..(19): n is 1,3-propane diol
  misc_feature (21)..(23): n is 5-(N-benzylcarboxyamide)-2'-deoxyuridine
  misc_feature (25)..(25): n is 5-(N-benzylcarboxyamide)-2'-deoxyuridine
nnacgacnacgnnacacgngnnnanagcg

SEQ ID NO: 365 - DNA, 29 bp, Artificial Sequence
  Synthetic
  misc_feature (1)..(2): n is 5-(N-benzylcarboxyamide)-2'-deoxyuridine
  misc_feature (8)..(8): n is 5-(N-benzylcarboxyamide)-2'-deoxyuridine
  misc_feature (12)..(13): n is 5-(N-benzylcarboxyamide)-2'-deoxyuridine
  misc_feature (20)..(20): n is 1,3-propane diol
  misc_feature (21)..(23): n is 5-(N-benzylcarboxyamide)-2'-deoxyuridine
  misc_feature (25)..(25): n is 5-(N-benzylcarboxyamide)-2'-deoxyuridine
nnacgacnacgnnacacgcnnnnanagcg

SEQ ID NO: 366 - DNA, 29 bp, Artificial Sequence
  Synthetic
  misc_feature (1)..(2): n is 5-(N-benzylcarboxyamide)-2'-deoxyuridine
  misc_feature (8)..(8): n is 5-(N-benzylcarboxyamide)-2'-deoxyuridine
  misc_feature (12)..(13): n is 5-(N-benzylcarboxyamide)-2'-deoxyuridine
  misc_feature (21)..(21): n is 1,3-propane diol
  misc_feature (22)..(23): n is 5-(N-benzylcarboxyamide)-2'-deoxyuridine
  misc_feature (25)..(25): n is 5-(N-benzylcarboxyamide)-2'-deoxyuridine
nnacgacnacgnnacacgcgnnnanagcg

SEQ ID NO: 367 - DNA, 29 bp, Artificial Sequence
  Synthetic
  misc_feature (1)..(2): n is 5-(N-benzylcarboxyamide)-2'-deoxyuridine
  misc_feature (8)..(8): n is 5-(N-benzylcarboxyamide)-2'-deoxyuridine
  misc_feature (12)..(13): n is 5-(N-benzylcarboxyamide)-2'-deoxyuridine
  misc_feature (21)..(21): n is 5-(N-benzylcarboxyamide)-2'-deoxyuridine
  misc_feature (22)..(22): n is 1,3-propane diol
  misc_feature (23)..(23): n is 5-(N-benzylcarboxyamide)-2'-deoxyuridine
  misc_feature (25)..(25): n is 5-(N-benzylcarboxyamide)-2'-deoxyuridine
nnacgacnacgnnacacgcgnnnanagcg

SEQ ID NO: 368 - DNA, 29 bp, Artificial Sequence
  Synthetic
  misc_feature (1)..(2): n is 5-(N-benzylcarboxyamide)-2'-deoxyuridine
  misc_feature (8)..(8): n is 5-(N-benzylcarboxyamide)-2'-deoxyuridine
  misc_feature (12)..(13): n is 5-(N-benzylcarboxyamide)-2'-deoxyuridine
  misc_feature (21)..(22): n is 5-(N-benzylcarboxyamide)-2'-deoxyuridine
  misc_feature (23)..(23): n is 1,3-propane diol
  misc_feature (25)..(25): n is 5-(N-benzylcarboxyamide)-2'-deoxyuridine
nnacgacnacgnnacacgcgnnnanagcg

SEQ ID NO: 369 - DNA, 29 bp, Artificial Sequence
  Synthetic
  misc_feature (1)..(2): n is 5-(N-benzylcarboxyamide)-2'-deoxyuridine
  misc_feature (8)..(8): n is 5-(N-benzylcarboxyamide)-2'-deoxyuridine
  misc_feature (12)..(13): n is 5-(N-benzylcarboxyamide)-2'-deoxyuridine
  misc_feature (21)..(23): n is 5-(N-benzylcarboxyamide)-2'-deoxyuridine
  misc_feature (25)..(25): n is 1,3-propane diol
nnacgacnacgnnacacgcgnnnanagcg

SEQ ID NO: 370 - DNA, 29 bp, Artificial Sequence
  Synthetic
  misc_feature (1)..(2): n is 5-(N-benzylcarboxyamide)-2'-deoxyuridine
  misc_feature (8)..(8): n is 5-(N-benzylcarboxyamide)-2'-deoxyuridine
  misc_feature (12)..(13): n is 5-(N-benzylcarboxyamide)-2'-deoxyuridine
  misc_feature (21)..(23): n is 5-(N-benzylcarboxyamide)-2'-deoxyuridine
  misc_feature (25)..(25): n is 5-(N-benzylcarboxyamide)-2'-deoxyuridine
  misc_feature (26)..(26): n is 1,3-propane diol
nnacgacnacgnnacacgcgnnnanngcg

SEQ ID NO: 371 - DNA, 29 bp, Artificial Sequence
  Synthetic
  misc_feature (1)..(2): n is 5-(N-benzylcarboxyamide)-2'-deoxyuridine
  misc_feature (8)..(8): n is 5-(N-benzylcarboxyamide)-2'-deoxyuridine
  misc_feature (12)..(13): n is 5-(N-benzylcarboxyamide)-2'-deoxyuridine
  misc_feature (21)..(23): n is 5-(N-benzylcarboxyamide)-2'-deoxyuridine
  misc_feature (25)..(25): n is 5-(N-benzylcarboxyamide)-2'-deoxyuridine
  misc_feature (27)..(27): n is 1,3-propane diol
nnacgacnacgnnacacgcgnnnanancg

SEQ ID NO: 372 - DNA, 29 bp, Artificial Sequence
  Synthetic
  misc_feature (1)..(2): n is 5-(N-benzylcarboxyamide)-2'-deoxyuridine
  misc_feature (3)..(3): n is 2'-O-methyl-adenosine
  misc_feature (6)..(6): n is 1,3-propane diol
  misc_feature (8)..(8): n is 1,3-propane diol
  misc_feature (9)..(9): n is 1,3-propane diol
  misc_feature (12)..(13): n is 5-(N-benzylcarboxyamide)-2'-deoxyuridine
  misc_feature (16)..(16): n is 2'-O-methyl-adenosine
  misc_feature (21)..(23): n is 5-(N-benzylcarboxyamide)-2'-deoxyuridine
  misc_feature (25)..(25): n is 5-(N-benzylcarboxyamide)-2'-deoxyuridine
  misc_feature (26)..(26): n is 2'-O-methyl-adenosine
  misc_feature (29)..(29): n is 2'-O-methyl-guanosine
nnncgncnncgnnacncgcgnnnanngcn

SEQ ID NO: 373 - DNA, 29 bp, Artificial Sequence
  Synthetic
  misc_feature (1)..(1): n is 5-(N-benzylcarboxyamide)-2'-deoxyuridine
  misc_feature (2)..(2): n is 2'-O-methyl-uridine
  misc_feature (8)..(8): n is 5-(N-benzylcarboxyamide)-2'-deoxyuridine
  misc_feature (12)..(13): n is 5-(N-benzylcarboxyamide)-2'-deoxyuridine
  misc_feature (21)..(23): n is 5-(N-benzylcarboxyamide)-2'-deoxyuridine
  misc_feature (25)..(25): n is 5-(N-benzylcarboxyamide)-2'-deoxyuridine
nnacgacnacgnnacacgcgnnnanagcg

SEQ ID NO: 374 - DNA, 29 bp, Artificial Sequence
  Synthetic
  misc_feature (1)..(2): n is 5-(N-benzylcarboxyamide)-2'-deoxyuridine
  misc_feature (8)..(8): n is 5-(N-benzylcarboxyamide)-2'-deoxyuridine
  misc_feature (12)..(12): n is 5-(N-benzylcarboxyamide)-2'-deoxyuridine
  misc_feature (13)..(13): n is 2'-O-methyl-uridine
  misc_feature (21)..(23): n is 5-(N-benzylcarboxyamide)-2'-deoxyuridine
  misc_feature (25)..(25): n is 5-(N-benzylcarboxyamide)-2'-deoxyuridine
nnacgacnacgnnacacgcgnnnanagcg

SEQ ID NO: 375 - DNA, 29 bp, Artificial Sequence
  Synthetic
  misc_feature (1)..(2): n is 5-(N-benzylcarboxyamide)-2'-deoxyuridine
  misc_feature (8)..(8): n is 5-(N-benzylcarboxyamide)-2'-deoxyuridine
  misc_feature (12)..(13): n is 5-(N-benzylcarboxyamide)-2'-deoxyuridine
  misc_feature (21)..(21): n is 2'-O-methyl-uridine
  misc_feature (22)..(23): n is 5-(N-benzylcarboxyamide)-2'-deoxyuridine
  misc_feature (25)..(25): n is 5-(N-benzylcarboxyamide)-2'-deoxyuridine
nnacgacnacgnnacacgcgnnnanagcg

SEQ ID NO: 376 - DNA, 29 bp, Artificial Sequence
  Synthetic
  misc_feature (1)..(2): n is 5-(N-benzylcarboxyamide)-2'-deoxyuridine
  misc_feature (8)..(8): n is 5-(N-benzylcarboxyamide)-2'-deoxyuridine
  misc_feature (12)..(13): n is 5-(N-benzylcarboxyamide)-2'-deoxyuridine
  misc_feature (21)..(21): n is 5-(N-benzylcarboxyamide)-2'-deoxyuridine
  misc_feature (22)..(22): n is 2'-O-methyl-uridine
  misc_feature (23)..(23): n is 5-(N-benzylcarboxyamide)-2'-deoxyuridine
  misc_feature (25)..(25): n is 5-(N-benzylcarboxyamide)-2'-deoxyuridine
nnacgacnacgnnacacgcgnnnanagcg

SEQ ID NO: 377 - DNA, 29 bp, Artificial Sequence
  Synthetic
  misc_feature (1)..(1): n is 5-[N-(1-naphthylmethyl)carboxyamide]-2'-deoxyuridine
  misc_feature (2)..(2): n is 5-(N-benzylcarboxyamide)-2'-deoxyuridine
  misc_feature (8)..(8): n is 5-(N-benzylcarboxyamide)-2'-deoxyuridine
  misc_feature (12)..(13): n is 5-(N-benzylcarboxyamide)-2'-deoxyuridine
  misc_feature (21)..(23): n is 5-(N-benzylcarboxyamide)-2'-deoxyuridine
  misc_feature (25)..(25): n is 2'-O-methyl-uridine
nnacgacnacgnnacacgcgnnnanagcg

SEQ ID NO: 378 - DNA, 25 bp, Artificial Sequence
  Synthetic
  misc_feature (1)..(1): n is 5-(N-benzylcarboxyamide)-2'-deoxyuridine
  misc_feature (2)..(2): n is 5-[N-(1-naphthylmethyl)carboxyamide]-2'-deoxyuridine
  misc_feature (5)..(6): n is hexaethylene glycol
  misc_feature (8)..(8): n is 2'-O-methyl-uridine
  misc_feature (9)..(9): n is 5-[N-(1-naphthylmethyl)carboxyamide]-2'-deoxyuridine
  misc_feature (17)..(18): n is 5-[N-(1-naphthylmethyl)carboxyamide]-2'-deoxyuridine
  misc_feature (19)..(19): n is 5-(N-benzylcarboxyamide)-2'-deoxyuridine
  misc_feature (21)..(21): n is 5-[N-(1-naphthylmethyl)carboxyamide]-2'-deoxyuridine
nnacnngnnacacgcgnnnanagcg

SEQ ID NO: 379 - DNA, 25 bp, Artificial Sequence
  Synthetic
  misc_feature (1)..(1): n is 5-(N-benzylcarboxyamide)-2'-deoxyuridine
  misc_feature (2)..(2): n is 5-[N-(1-naphthylmethyl)carboxyamide]-2'-deoxyuridine
  misc_feature (3)..(3): n is 2'-O-methyl-adenosine
  misc_feature (5)..(6): n is hexaethylene glycol
  misc_feature (8)..(8): n is 2'-O-methyl-uridine
  misc_feature (9)..(9): n is 5-[N-(1-naphthylmethyl)carboxyamide]-2'-deoxyuridine
  misc_feature (12)..(12): n is 2'-O-methyl-adenosine
  misc_feature (17)..(18): n is 5-[N-(1-naphthylmethyl)carboxyamide]-2'-deoxyuridine
  misc_feature (19)..(19): n is 5-(N-benzylcarboxyamide)-2'-deoxyuridine
  misc_feature (21)..(21): n is 5-[N-(1-naphthylmethyl)carboxyamide]-2'-deoxyuridine
  misc_feature (22)..(22): n is 2'-O-methyl-adenosine
  misc_feature (25)..(25): n is 2'-O-methyl-guanosine
nnncnngnnacncgcgnnnanngcn

SEQ ID NO: 380 - DNA, 23 bp, Artificial Sequence
  Synthetic
  misc_feature (1)..(2): n is 5-(N-benzylcarboxyamide)-2'-deoxyuridine
  misc_feature (6)..(7): n is 5-(N-benzylcarboxyamide)-2'-deoxyuridine
  misc_feature (15)..(17): n is 5-(N-benzylcarboxyamide)-2'-deoxyuridine
  misc_feature (19)..(19): n is 5-(N-benzylcarboxyamide)-2'-deoxyuridine
nnacgnnacacgcgnnnanagcg

SEQ ID NO: 381 - DNA, 24 bp, Artificial Sequence
  Synthetic
  misc_feature (1)..(2): n is 5-(N-benzylcarboxyamide)-2'-deoxyuridine
  misc_feature (3)..(3): n is 2'-O-methyl-adenosine
  misc_feature (5)..(5): n is hexaethylene glycol
  misc_feature (7)..(7): n is 5-(N-benzylcarboxyamide)-2'-deoxyuridine
  misc_feature (8)..(8): n is 5-[N-(3-indole-2-ethyl)-carboxyamide]-2'-deoxyuridine
  misc_feature (11)..(11): n is 2'-O-methyl-adenosine
  misc_feature (16)..(18): n is 5-(N-benzylcarboxyamide)-2'-deoxyuridine
  misc_feature (20)..(20): n is 5-(N-benzylcarboxyamide)-2'-deoxyuridine
  misc_feature (21)..(21): n is 2'-O-methyl-adenosine
  misc_feature (24)..(24): n is 2'-O-methyl-guanosine
nnncngnnacncgcgnnnanngcn

SEQ ID NO: 382 - DNA, 24 bp, Artificial Sequence
  Synthetic
  misc_feature (1)..(2): n is 5-(N-benzylcarboxyamide)-2'-deoxyuridine
  misc_feature (3)..(3): n is 2'-O-methyl-adenosine
  misc_feature (5)..(5): n is hexaethylene glycol
  misc_feature (7)..(8): n is 5-(N-benzylcarboxyamide)-2'-deoxyuridine
  misc_feature (11)..(11): n is 2'-O-methyl-adenosine
  misc_feature (16)..(16): n is 5-[N-(3-indole-2-ethyl)-carboxyamide]-2'-deoxyuridine
  misc_feature (17)..(18): n is 5-(N-benzylcarboxyamide)-2'-deoxyuridine
  misc_feature (20)..(20): n is 5-(N-benzylcarboxyamide)-2'-deoxyuridine
  misc_feature (21)..(21): n is 2'-O-methyl-adenosine
  misc_feature (24)..(24): n is 2'-O-methyl-guanosine
nnncngnnacncgcgnnnanngcn

SEQ ID NO: 383 - DNA, 24 bp, Artificial Sequence
  Synthetic
  misc_feature (1)..(2): n is 5-(N-benzylcarboxyamide)-2'-deoxyuridine
  misc_feature (3)..(3): n is 2'-O-methyl-adenosine
  misc_feature (5)..(5): n is hexaethylene glycol
  misc_feature (7)..(8): n is 5-(N-benzylcarboxyamide)-2'-deoxyuridine
  misc_feature (11)..(11): n is 2'-O-methyl-adenosine
  misc_feature (16)..(16): n is 5-(N-benzylcarboxyamide)-2'-deoxyuridine
  misc_feature (17)..(17): n is 5-[N-(3-indole-2-ethyl)-carboxyamide]-2'-deoxyuridine
  misc_feature (18)..(18): n is 5-(N-benzylcarboxyamide)-2'-deoxyuridine
  misc_feature (20)..(20): n is 5-(N-benzylcarboxyamide)-2'-deoxyuridine
  misc_feature (21)..(21): n is 2'-O-methyl-adenosine
  misc_feature (24)..(24): n is 2'-O-methyl-guanosine
nnncngnnacncgcgnnnanngcn

SEQ ID NO: 384 - DNA, 24 bp, Artificial Sequence
  Synthetic
  misc_feature (1)..(2): n is 5-(N-benzylcarboxyamide)-2'-deoxyuridine
  misc_feature (3)..(3): n is 2'-O-methyl-adenosine
  misc_feature (5)..(5): n is hexaethylene glycol
  misc_feature (7)..(7): n is 5-(N-benzylcarboxyamide)-2'-deoxyuridine
  misc_feature (8)..(8): n is 5-[N-(2-naphthylmethyl)carboxyamide]-2'-deoxyuridine
  misc_feature (11)..(11): n is 2'-O-methyl-adenosine
  misc_feature (16)..(18): n is 5-(N-benzylcarboxyamide)-2'-deoxyuridine
  misc_feature (20)..(20): n is 5-(N-benzylcarboxyamide)-2'-deoxyuridine
  misc_feature (21)..(21): n is 2'-O-methyl-adenosine
  misc_feature (24)..(24): n is 2'-O-methyl-guanosine
nnncngnnacncgcgnnnanngcn

SEQ ID NO: 385 - DNA, 24 bp, Artificial Sequence
  Synthetic
  misc_feature (1)..(2): n is 5-(N-benzylcarboxyamide)-2'-deoxyuridine
  misc_feature (3)..(3): n is 2'-O-methyl-adenosine
  misc_feature (5)..(5): n is hexaethylene glycol
  misc_feature (7)..(8): n is 5-(N-benzylcarboxyamide)-2'-deoxyuridine
  misc_feature (11)..(11): n is 2'-O-methyl-adenosine
  misc_feature (16)..(16): n is 5-(N-benzylcarboxyamide)-2'-deoxyuridine
  misc_feature (17)..(17): n is 5-[N-(2-naphthyl-2-ethyl)carboxyamide]-2'-deoxyuridine
  misc_feature (18)..(18): n is 5-(N-benzylcarboxyamide)-2'-deoxyuridine
  misc_feature (20)..(20): n is 5-(N-benzylcarboxyamide)-2'-deoxyuridine
  misc_feature (21)..(21): n is 2'-O-methyl-adenosine
  misc_feature (24)..(24): n is 2'-O-methyl-guanosine
nnncngnnacncgcgnnnanngcn

SEQ ID NO: 386 - DNA, 24 bp, Artificial Sequence
  Synthetic
  misc_feature (1)..(2): n is 5-(N-benzylcarboxyamide)-2'-deoxyuridine
  misc_feature (3)..(3): n is 2'-O-methyl-adenosine
  misc_feature (5)..(5): n is hexaethylene glycol
  misc_feature (7)..(8): n is 5-(N-benzylcarboxyamide)-2'-deoxyuridine
  misc_feature (9)..(9): n is 2'-O-methyl-adenosine
  misc_feature (11)..(11): n is 2'-O-methyl-adenosine
  misc_feature (16)..(18): n is 5-(N-benzylcarboxyamide)-2'-deoxyuridine
  misc_feature (20)..(20): n is 5-(N-benzylcarboxyamide)-2'-deoxyuridine
  misc_feature (21)..(21): n is 2'-O-methyl-adenosine
  misc_feature (24)..(24): n is 2'-O-methyl-guanosine
nnncngnnncncgcgnnnanngcn

SEQ ID NO: 387 - DNA, 24 bp, Artificial Sequence
  Synthetic
  misc_feature (1)..(1): n is 5-[N-(4-hydroxyphenyl-2-ethyl)carboxyamide]-2'-deoxyuridine
  misc_feature (2)..(2): n is 5-[N-(3,4-methylenedioxyphenyl-methyl)carboxyamide]-2'-deoxyuridi ne
  misc_feature (3)..(3): n is 2'-O-methyl-adenosine
  misc_feature (5)..(5): n is hexaethylene glycol
  misc_feature (7)..(7): n is 5-[N-(4-fluorobenzyl)carboxyamide]-2'-deoxyuridine
  misc_feature (8)..(8): n is 5-[N-isobutyl-carboxyamide]-2'-deoxyuridine
  misc_feature (11)..(11): n is 2'-O-methyl-adenosine
  misc_feature (16)..(16): n is 5-[N-(2-naphthylmethyl)carboxyamide]-2'-deoxyuridine
  misc_feature (17)..(17): n is 5-[N-(phenyl-2-ethyl)-carboxyamide]-2'-deoxyuridine
  misc_feature (18)..(18): n is 5-[N-(2-thiophene-methyl)carboxyamide]-2'-deoxyuridine
  misc_feature (20)..(20): n is 5-[N-(1-naphthyl-2-ethyl)carboxyamide]-2'-deoxyuridine
  misc_feature (21)..(21): n is 2'-O-methyl-adenosine
  misc_feature (24)..(24): n is 2'-O-methyl-guanosine
nnncngnnacncgcgnnnanngcn

SEQ ID NO: 388 - DNA, 24 bp, Artificial Sequence
  Synthetic
  misc_feature (1)..(1): n is 5-[N-(4-hydroxyphenyl-2-ethyl)carboxyamide]-2'-deoxyuridine
  misc_feature (2)..(2): n is 5-[N-(3,4-methylenedioxyphenyl-methyl)carboxyamide]-2'-deoxyuridi ne
  misc_feature (3)..(3): n is 2'-O-methyl-adenosine
  misc_feature (5)..(5): n is hexaethylene glycol
  misc_feature (7)..(7): n is 5-[N-(4-fluorobenzyl)carboxyamide]-2'-deoxyuridine
  misc_feature (8)..(8): n is 5-[N-isobutyl-carboxyamide]-2'-deoxyuridine
  misc_feature (11)..(11): n is 2'-O-methyl-adenosine
  misc_feature (12)..(12): n is 2'-O-methyl-cytidine
  misc_feature (16)..(16): n is 5-[N-(2-naphthylmethyl)carboxyamide]-2'-deoxyuridine
  misc_feature (17)..(17): n is 5-[N-(phenyl-2-ethyl)-carboxyamide]-2'-deoxyuridine
  misc_feature (18)..(18): n is 5-[N-(2-thiophene-methyl)carboxyamide]-2'-deoxyuridine
  misc_feature (19)..(19): n is 2'-O-methyl-adenosine
  misc_feature (20)..(20): n is 5-[N-(1-naphthyl-2-ethyl)carboxyamide]-2'-deoxyuridine
  misc_feature (21)..(21): n is 2'-O-methyl-adenosine
  misc_feature (22)..(22): n is 2'-O-methyl-guanosine
  misc_feature (24)..(24): n is 2'-O-methyl-guanosine
nnncngnnacnngcgnnnnnnncn

SEQ ID NO: 389 - DNA, 24 bp, Artificial Sequence
  Synthetic
  misc_feature (1)..(1): n is 5-[N-(3-indole-2-ethyl)-carboxyamide]-2'-deoxyuridine
  misc_feature (2)..(2): n is 5-[N-isobutyl-carboxyamide]-2'-deoxyuridine
  misc_feature (3)..(3): n is 2'-O-methyl-adenosine
  misc_feature (5)..(5): n is hexaethylene glycol
  misc_feature (7)..(7): n is 5-[N-(1-naphthyl-2-ethyl)carboxyamide]-2'-deoxyuridine
  misc_feature (8)..(8): n is 5-[N-isobutyl-carboxyamide]-2'-deoxyuridine
  misc_feature (11)..(11): n is 2'-O-methyl-adenosine
  misc_feature (16)..(16): n is 5-[N-(2-thiophene-methyl)carboxyamide]-2'-deoxyuridine
  misc_feature (17)..(17): n is 5-[N-(phenyl-2-ethyl)-carboxyamide]-2'-deoxyuridine
  misc_feature (18)..(18): n is 5-[N-(2-thiophene-methyl)carboxyamide]-2'-deoxyuridine
  misc_feature (20)..(20): n is 5-[N-(3,4-methylenedioxyphenyl-methyl)carboxyamide]-2'-deoxyuridi ne
  misc_feature (21)..(21): n is 2'-O-methyl-adenosine
  misc_feature (24)..(24): n is 2'-O-methyl-guanosine
nnncngnnacncgcgnnnanngcn

SEQ ID NO: 390 - DNA, 24 bp, Artificial Sequence
  Synthetic
  misc_feature (1)..(1): n is 5-[N-(3-indole-2-ethyl)-carboxyamide]-2'-deoxyuridine
  misc_feature (2)..(2): n is 5-[N-isobutyl-carboxyamide]-2'-deoxyuridine
  misc_feature (3)..(3): n is 2'-O-methyl-adenosine
  misc_feature (5)..(5): n is hexaethylene glycol
  misc_feature (7)..(7): n is 5-[N-(1-naphthyl-2-ethyl)carboxyamide]-2'-deoxyuridine
  misc_feature (8)..(8): n is 5-[N-isobutyl-carboxyamide]-2'-deoxyuridine
  misc_feature (11)..(11): n is 2'-O-methyl-adenosine
  misc_feature (12)..(12): n is 2'-O-methyl-cytidine
  misc_feature (16)..(16): n is 5-[N-(2-thiophene-methyl)carboxyamide]-2'-deoxyuridine
  misc_feature (17)..(17): n is 5-[N-(phenyl-2-ethyl)-carboxyamide]-2'-deoxyuridine
  misc_feature (18)..(18): n is 5-[N-(2-thiophene-methyl)carboxyamide]-2'-deoxyuridine
  misc_feature (19)..(19): n is 2'-O-methyl-adenosine
  misc_feature (20)..(20): n is 5-[N-(3,4-methylenedioxyphenyl-methyl)carboxyamide]-2'-deoxyuridi ne
  misc_feature (21)..(21): n is 2'-O-methyl-adenosine
  misc_feature (22)..(22): n is 2'-O-methyl-guanosine
  misc_feature (24)..(24): n is 2'-O-methyl-guanosine
nnncngnnacnngcgnnnnnnncn

SEQ ID NO: 391 - DNA, 24 bp, Artificial Sequence
  Synthetic
  misc_feature (1)..(2): n is 5-(N-benzylcarboxyamide)-2'-deoxyuridine
  misc_feature (3)..(3): n is 2'-O-methyl-adenosine
  misc_feature (5)..(5): n is hexaethylene glycol
  misc_feature (7)..(7): n is 2'-O-methyl-uridine
  misc_feature (8)..(8): n is 5-[N-isobutyl-carboxyamide]-2'-deoxyuridine
  misc_feature (11)..(11): n is 2'-O-methyl-adenosine
  misc_feature (16)..(18): n is 5-(N-benzylcarboxyamide)-2'-deoxyuridine
  misc_feature (20)..(20): n is 5-(N-benzylcarboxyamide)-2'-deoxyuridine
  misc_feature (21)..(21): n is 2'-O-methyl-adenosine
  misc_feature (24)..(24): n is 2'-O-methyl-guanosine
nnncngnnacncgcgnnnanngcn

SEQ ID NO: 392 - DNA, 24 bp, Artificial Sequence
  Synthetic
  misc_feature (1)..(2): n is 5-(N-benzylcarboxyamide)-2'-deoxyuridine
  misc_feature (3)..(3): n is 2'-O-methyl-adenosine
  misc_feature (5)..(5): n is hexaethylene glycol
  misc_feature (7)..(7): n is 5-[N-(4-fluorobenzyl)carboxyamide]-2'-deoxyuridine
  misc_feature (8)..(8): n is 5-[N-isobutyl-carboxyamide]-2'-deoxyuridine
  misc_feature (11)..(11): n is 2'-O-methyl-adenosine
  misc_feature (16)..(16): n is 5-(N-benzylcarboxyamide)-2'-deoxyuridine
  misc_feature (17)..(17): n is 5-[N-(phenyl-2-ethyl)-carboxyamide]-2'-deoxyuridine
  misc_feature (18)..(18): n is 5-[N-(2-thiophene-methyl)carboxyamide]-2'-deoxyuridine
  misc_feature (20)..(20): n is 5-(N-benzylcarboxyamide)-2'-deoxyuridine
  misc_feature (21)..(21): n is 2'-O-methyl-adenosine
  misc_feature (24)..(24): n is 2'-O-methyl-guanosine
nnncngnnacncgcgnnnanngcn

SEQ ID NO: 393 - DNA, 24 bp, Artificial Sequence
  Synthetic
  misc_feature (1)..(1): n is 5-[N-(4-hydroxyphenyl-2-ethyl)carboxyamide]-2'-deoxyuridine
  misc_feature (2)..(2): n is 5-(N-benzylcarboxyamide)-2'-deoxyuridine
  misc_feature (3)..(3): n is 2'-O-methyl-adenosine
  misc_feature (5)..(5): n is hexaethylene glycol
  misc_feature (7)..(7): n is 5-(N-benzylcarboxyamide)-2'-deoxyuridine
  misc_feature (8)..(8): n is 5-[N-isobutyl-carboxyamide]-2'-deoxyuridine
  misc_feature (11)..(11): n is 2'-O-methyl-adenosine
  misc_feature (16)..(16): n is 5-(N-benzylcarboxyamide)-2'-deoxyuridine
  misc_feature (17)..(17): n is 5-[N-(phenyl-2-ethyl)-carboxyamide]-2'-deoxyuridine
  misc_feature (18)..(18): n is 5-[N-(2-thiophene-methyl)carboxyamide]-2'-deoxyuridine
  misc_feature (20)..(20): n is 5-(N-benzylcarboxyamide)-2'-deoxyuridine
  misc_feature (21)..(21): n is 2'-O-methyl-adenosine
  misc_feature (24)..(24): n is 2'-O-methyl-guanosine
nnncngnnacncgcgnnnanngcn

SEQ ID NO: 394 - DNA, 24 bp, Artificial Sequence
  Synthetic
  misc_feature (1)..(1): n is 5-[N-(4-hydroxyphenyl-2-ethyl)carboxyamide]-2'-deoxyuridine
  misc_feature (2)..(2): n is 5-(N-benzylcarboxyamide)-2'-deoxyuridine
  misc_feature (3)..(3): n is 2'-O-methyl-adenosine
  misc_feature (5)..(5): n is hexaethylene glycol
  misc_feature (7)..(7): n is 5-[N-(4-fluorobenzyl)carboxyamide]-2'-deoxyuridine
  misc_feature (8)..(8): n is 5-[N-isobutyl-carboxyamide]-2'-deoxyuridine
  misc_feature (11)..(11): n is 2'-O-methyl-adenosine
  misc_feature (16)..(16): n is 5-[N-(2-naphthylmethyl)carboxyamide]-2'-deoxyuridine
  misc_feature (17)..(17): n is 5-[N-(phenyl-2-ethyl)-carboxyamide]-2'-deoxyuridine
  misc_feature (18)..(18): n is 5-[N-(2-thiophene-methyl)carboxyamide]-2'-deoxyuridine
  misc_feature (20)..(20): n is 5-(N-benzylcarboxyamide)-2'-deoxyuridine
  misc_feature (21)..(21): n is 2'-O-methyl-adenosine
  misc_feature (24)..(24): n is 2'-O-methyl-guanosine
nnncngnnacncgcgnnnanngcn

SEQ ID NO: 395 - DNA, 23 bp, Artificial Sequence
  Synthetic
  misc_feature (1)..(2): n is 5-(N-benzylcarboxyamide)-2'-deoxyuridine
  misc_feature (3)..(3): n is 2'-O-methyl-adenosine
  misc_feature (5)..(5): n is 1,3-propane diol
  misc_feature (7)..(8): n is 5-(N-benzylcarboxyamide)-2'-deoxyuridine
  misc_feature (11)..(11): n is 1,3-propane diol
  misc_feature (15)..(17): n is 5-(N-benzylcarboxyamide)-2'-deoxyuridine
  misc_feature (19)..(19): n is 5-(N-benzylcarboxyamide)-2'-deoxyuridine
  misc_feature (20)..(20): n is 2'-O-methyl-adenosine
  misc_feature (23)..(23): n is 2'-O-methyl-guanosine
nnncngnnacngcgnnnanngcn

SEQ ID NO: 396 - DNA, 24 bp, Artificial Sequence
  Synthetic
  misc_feature (1)..(1): n is 5-(N-benzylcarboxyamide)-2'-O-methyl-uridine
  misc_feature (2)..(2): n is 5-(N-benzylcarboxyamide)-2'-deoxyuridine
  misc_feature (3)..(3): n is 2'-O-methyl-adenosine
  misc_feature (5)..(5): n is hexaethylene glycol
  misc_feature (7)..(8): n is 5-(N-benzylcarboxyamide)-2'-deoxyuridine
  misc_feature (11)..(11): n is 2'-O-methyl-adenosine
  misc_feature (16)..(18): n is 5-(N-benzylcarboxyamide)-2'-deoxyuridine
  misc_feature (20)..(20): n is 5-(N-benzylcarboxyamide)-2'-deoxyuridine
  misc_feature (21)..(21): n is 2'-O-methyl-adenosine
  misc_feature (24)..(24): n is 2'-O-methyl-guanosine
nnncngnnacncgcgnnnanngcn

SEQ ID NO: 397 - DNA, 24 bp, Artificial Sequence
  Synthetic
  misc_feature (1)..(1): n is 5-(N-benzylcarboxyamide)-2'-deoxyuridine
  misc_feature (2)..(2): n is 5-(N-benzylcarboxyamide)-2'-O-methyl-uridine
  misc_feature (3)..(3): n is 2'-O-methyl-adenosine
  misc_feature (5)..(5): n is hexaethylene glycol
  misc_feature (7)..(8): n is 5-(N-benzylcarboxyamide)-2'-deoxyuridine
  misc_feature (11)..(11): n is 2'-O-methyl-adenosine
  misc_feature (16)..(18): n is 5-(N-benzylcarboxyamide)-2'-deoxyuridine
  misc_feature (20)..(20): n is 5-(N-benzylcarboxyamide)-2'-deoxyuridine
  misc_feature (21)..(21): n is 2'-O-methyl-adenosine
  misc_feature (24)..(24): n is 2'-O-methyl-guanosine
nnncngnnacncgcgnnnanngcn

SEQ ID NO: 398 - DNA, 24 bp, Artificial Sequence
  Synthetic
  misc_feature (1)..(2): n is 5-(N-benzylcarboxyamide)-2'-deoxyuridine
  misc_feature (3)..(3): n is 2'-O-methyl-adenosine
  misc_feature (5)..(5): n is hexaethylene glycol
  misc_feature (7)..(8): n is 5-(N-benzylcarboxyamide)-2'-deoxyuridine
  misc_feature (11)..(11): n is 2'-O-methyl-adenosine
  misc_feature (16)..(16): n is 5-(N-benzylcarboxyamide)-2'-O-methyl-uridine
  misc_feature (17)..(18): n is 5-(N-benzylcarboxyamide)-2'-deoxyuridine
  misc_feature (20)..(20): n is 5-(N-benzylcarboxyamide)-2'-deoxyuridine
  misc_feature (21)..(21): n is 2'-O-methyl-adenosine
  misc_feature (24)..(24): n is 2'-O-methyl-guanosine
nnncngnnacncgcgnnnanngcn

SEQ ID NO: 399 - DNA, 24 bp, Artificial Sequence
  Synthetic
  misc_feature (1)..(2): n is5-(N-benzylcarboxyamide)-2'-deoxyuridine
  misc_feature (3)..(3): n is 2'-O-methyl-adenosine
  misc_feature (5)..(5): n is hexaethylene glycol
  misc_feature (7)..(8): n is5-(N-benzylcarboxyamide)-2'-deoxyuridine
  misc_feature (11)..(11): n is 2'-O-methyl-adenosine
  misc_feature (16)..(16): n is5-(N-benzylcarboxyamide)-2'-deoxyuridine
  misc_feature (17)..(17): n is 5-(N-benzylcarboxyamide)-2'-O-methyl-uridine
  misc_feature (18)..(18): n is5-(N-benzylcarboxyamide)-2'-deoxyuridine
  misc_feature (20)..(20): n is5-(N-benzylcarboxyamide)-2'-deoxyuridine
  misc_feature (21)..(21): n is 2'-O-methyl-adenosine
  misc_feature (24)..(24): n is 2'-O-methyl-guanosine
nnncngnnacncgcgnnnanngcn

SEQ ID NO: 400 - DNA, 24 bp, Artificial Sequence
  Synthetic
  misc_feature (1)..(2): n is 5-(N-benzylcarboxyamide)-2'-deoxyuridine
  misc_feature (3)..(3): n is 2'-O-methyl-adenosine
  misc_feature (5)..(5): n is hexaethylene glycol
  misc_feature (7)..(7): n is 5-(N-benzylcarboxyamide)-2'-O-methyl-uridine
  misc_feature (8)..(8): n is 5-(N-benzylcarboxyamide)-2'-deoxyuridine
  misc_feature (9)..(9): n is 2'-fluoro-2'-deoxyadenosine
  misc_feature (11)..(11): n is 2'-O-methyl-adenosine
  misc_feature (12)..(12): n is 2'-O-methyl-cytidine
  misc_feature (16)..(16): n is 5-(N-benzylcarboxyamide)-2'-deoxyuridine
  misc_feature (17)..(17): n is 5-[N-(phenyl-2-ethyl)-carboxyamide]-2'-deoxyuridine
  misc_feature (18)..(18): n is 5-(N-benzylcarboxyamide)-2'-O-methyl-uridine
  misc_feature (19)..(19): n is 2'-O-methyl-adenosine
  misc_feature (20)..(20): n is 5-(N-benzylcarboxyamide)-2'-deoxyuridine
  misc_feature (21)..(21): n is 2'-O-methyl-adenosine
  misc_feature (24)..(24): n is 2'-O-methyl-guanosine
nnncngnnncnngcgnnnnnngcn

SEQ ID NO: 401 - DNA, 24 bp, Artificial Sequence
  Synthetic
  misc_feature (1)..(2): n is 5-(N-benzylcarboxyamide)-2'-deoxyuridine
  misc_feature (3)..(3): n is 2'-O-methyl-adenosine
  misc_feature (5)..(5): n is hexaethylene glycol
  misc_feature (7)..(7): n is 5-(N-benzylcarboxyamide)-2'-O-methyl-uridine
  misc_feature (8)..(8): n is 5-(N-benzylcarboxyamide)-2'-deoxyuridine
  misc_feature (10)..(10): n is 2'-fluoro-2'-deoxycytidine
  misc_feature (11)..(11): n is 2'-O-methyl-adenosine
  misc_feature (12)..(12): n is 2'-O-methyl-cytidine
  misc_feature (16)..(16): n is 5-(N-benzylcarboxyamide)-2'-deoxyuridine
  misc_feature (17)..(17): n is 5-[N-(phenyl-2-ethyl)-carboxyamide]-2'-deoxyuridine
  misc_feature (18)..(18): n is 5-(N-benzylcarboxyamide)-2'-O-methyl-uridine
  misc_feature (19)..(19): n is 2'-O-methyl-adenosine
  misc_feature (20)..(20): n is 5-(N-benzylcarboxyamide)-2'-deoxyuridine
  misc_feature (21)..(21): n is 2'-O-methyl-adenosine
  misc_feature (24)..(24): n is 2'-O-methyl-guanosine
nnncngnnannngcgnnnnnngcn

SEQ ID NO: 402 - DNA, 24 bp, Artificial Sequence
  Synthetic
  misc_feature (1)..(2): n is 5-(N-benzylcarboxyamide)-2'-deoxyuridine
  misc_feature (3)..(3): n is 2'-O-methyl-adenosine
  misc_feature (5)..(5): n is hexaethylene glycol
  misc_feature (7)..(7): n is 5-(N-benzylcarboxyamide)-2'-O-methyl-uridine
  misc_feature (8)..(8): n is 5-(N-benzylcarboxyamide)-2'-deoxyuridine
  misc_feature (11)..(11): n is 2'-O-methyl-adenosine
  misc_feature (12)..(12): n is 2'-O-methyl-cytidine
  misc_feature (14)..(14): n is 2'-fluoro-2'-deoxycytidine
  misc_feature (16)..(16): n is 5-(N-benzylcarboxyamide)-2'-deoxyuridine
  misc_feature (17)..(17): n is 5-[N-(phenyl-2-ethyl)-carboxyamide]-2'-deoxyuridine
  misc_feature (18)..(18): n is 5-(N-benzylcarboxyamide)-2'-O-methyl-uridine
  misc_feature (19)..(19): n is 2'-O-methyl-adenosine
  misc_feature (20)..(20): n is 5-(N-benzylcarboxyamide)-2'-deoxyuridine
  misc_feature (21)..(21): n is 2'-O-methyl-adenosine
  misc_feature (24)..(24): n is 2'-O-methyl-guanosine
nnncngnnacnngngnnnnnngcn

SEQ ID NO: 403 - DNA, 24 bp, Artificial Sequence
  Synthetic
  misc_feature (1)..(2): n is 5-(N-benzylcarboxyamide)-2'-deoxyuridine
  misc_feature (3)..(3): n is 2'-O-methyl-adenosine
  misc_feature (5)..(5): n is hexaethylene glycol
  misc_feature (7)..(7): n is 5-(N-benzylcarboxyamide)-2'-deoxyuridine
  misc_feature (11)..(11): n is 2'-O-methyl-adenosine
  misc_feature (16)..(18): n is 5-(N-benzylcarboxyamide)-2'-deoxyuridine
  misc_feature (20)..(20): n is 5-(N-benzylcarboxyamide)-2'-deoxyuridine
  misc_feature (21)..(21): n is 2'-O-methyl-adenosine
  misc_feature (24)..(24): n is 2'-O-methyl-guanosine
nnncngntacncgcgnnnanngcn

SEQ ID NO: 404 - DNA, 24 bp, Artificial Sequence
  Synthetic
  misc_feature (1)..(2): n is 5-(N-benzylcarboxyamide)-2'-deoxyuridine
  misc_feature (3)..(3): n is 2'-O-methyl-adenosine
  misc_feature (5)..(5): n is hexaethylene glycol
  misc_feature (7)..(8): n is 5-(N-benzylcarboxyamide)-2'-deoxyuridine
  misc_feature (11)..(11): n is 2'-O-methyl-adenosine
  misc_feature (17)..(18): n is 5-(N-benzylcarboxyamide)-2'-deoxyuridine
  misc_feature (20)..(20): n is 5-(N-benzylcarboxyamide)-2'-deoxyuridine
  misc_feature (21)..(21): n is 2'-O-methyl-adenosine
  misc_feature (24)..(24): n is 2'-O-methyl-guanosine
nnncngnnacncgcgtnnanngcn

SEQ ID NO: 405 - DNA, 24 bp, Artificial Sequence
  Synthetic
  misc_feature (1)..(2): n is 5-(N-benzylcarboxyamide)-2'-deoxyuridine
  misc_feature (3)..(3): n is 2'-O-methyl-adenosine
  misc_feature (5)..(5): n is hexaethylene glycol
  misc_feature (7)..(8): n is 5-(N-benzylcarboxyamide)-2'-deoxyuridine
  misc_feature (11)..(11): n is 2'-O-methyl-adenosine
  misc_feature (16)..(16): n is 5-(N-benzylcarboxyamide)-2'-deoxyuridine
  misc_feature (18)..(18): n is 5-(N-benzylcarboxyamide)-2'-deoxyuridine
  misc_feature (20)..(20): n is 5-(N-benzylcarboxyamide)-2'-deoxyuridine
  misc_feature (21)..(21): n is 2'-O-methyl-adenosine
  misc_feature (24)..(24): n is 2'-O-methyl-guanosine
nnncngnnacncgcgntnanngcn

SEQ ID NO: 406 - DNA, 24 bp, Artificial Sequence
  Synthetic
  misc_feature (1)..(2): n is 5-(N-benzylcarboxyamide)-2'-deoxyuridine
  misc_feature (3)..(3): n is 2'-O-methyl-adenosine
  misc_feature (5)..(5): n is hexaethylene glycol
  misc_feature (7)..(8): n is 5-(N-benzylcarboxyamide)-2'-deoxyuridine
  misc_feature (11)..(11): n is 2'-O-methyl-adenosine
  misc_feature (16)..(17): n is 5-(N-benzylcarboxyamide)-2'-deoxyuridine
  misc_feature (20)..(20): n is 5-(N-benzylcarboxyamide)-2'-deoxyuridine
  misc_feature (21)..(21): n is 2'-O-methyl-adenosine
  misc_feature (24)..(24): n is 2'-O-methyl-guanosine
nnncngnnacncgcgnntanngcn

SEQ ID NO: 407 - DNA, 24 bp, Artificial Sequence
  Synthetic
  misc_feature (1)..(2): n is 5-(N-benzylcarboxyamide)-2'-deoxyuridine
  misc_feature (3)..(3): n is 2'-O-methyl-adenosine
  misc_feature (5)..(5): n is hexaethylene glycol
  misc_feature (7)..(8): n is 5-(N-benzylcarboxyamide)-2'-deoxyuridine
  misc_feature (11)..(11): n is 2'-O-methyl-adenosine
  misc_feature (16)..(18): n is 5-(N-benzylcarboxyamide)-2'-deoxyuridine
  misc_feature (21)..(21): n is 2'-O-methyl-adenosine
  misc_feature (24)..(24): n is 2'-O-methyl-guanosine
nnncngnnacncgcgnnnatngcn

SEQ ID NO: 408 - DNA, 20 bp, Artificial Sequence
  Synthetic
  misc_feature (1)..(2): n is 5-(N-benzylcarboxyamide)-2'-deoxyuridine
  misc_feature (5)..(5): n is hexaethylene glycol
  misc_feature (7)..(8): n is 5-(N-benzylcarboxyamide)-2'-deoxyuridine
  misc_feature (11)..(11): n is 1,3-propane diol
  misc_feature (14)..(16): n is 5-(N-benzylcarboxyamide)-2'-deoxyuridine
  misc_feature (18)..(18): n is 5-(N-benzylcarboxyamide)-2'-deoxyuridine
nnacngnnacncgnnnanag

SEQ ID NO: 409 - DNA, 24 bp, Artificial Sequence
  Synthetic
  misc_feature (1)..(1): n is 5-(N-benzylcarboxyamide)-2'-deoxyuridine
  misc_feature (2)..(2): n is 5-[N-(3,4-methylenedioxyphenyl-methyl)carboxyamide]-2'-deoxyuridi ne
  misc_feature (3)..(3): n is 2'-O-methyl-adenosine
  misc_feature (5)..(5): n is hexaethylene glycol
  misc_feature (7)..(7): n is 5-(N-benzylcarboxyamide)-2'-O-methyl-uridine
  misc_feature (8)..(8): n is 5-(N-benzylcarboxyamide)-2'-deoxyuridine
  misc_feature (9)..(9): n is 2'-O-methyl-adenosine
  misc_feature (11)..(11): n is 1,3-propane diol
  misc_feature (12)..(12): n is 2'-O-methyl-cytidine
  misc_feature (15)..(15): n is 2'-O-methyl-guanosine
  misc_feature (16)..(17): n is 5-(N-benzylcarboxyamide)-2'-deoxyuridine
  misc_feature (18)..(18): n is 5-(N-benzylcarboxyamide)-2'-O-methyl-uridine
  misc_feature (19)..(19): n is 2'-O-methyl-adenosine
  misc_feature (20)..(20): n is 5-(N-benzylcarboxyamide)-2'-deoxyuridine
  misc_feature (21)..(21): n is 2'-O-methyl-adenosine
  misc_feature (24)..(24): n is 2'-O-methyl-guanosine
nnncngnnncnngcnnnnnnngcn

SEQ ID NO: 410 - DNA, 50 bp, Artificial Sequence
  Synthetic
  misc_feature (6)..(6): n is 5-[N-(1-naphthylmethyl)carboxyamide]-2'-deoxyuridine
  misc_feature (15)..(15): n is 5-[N-(1-naphthylmethyl)carboxyamide]-2'-deoxyuridine
  misc_feature (17)..(17): n is 5-[N-(1-naphthylmethyl)carboxyamide]-2'-deoxyuridine
  misc_feature (19)..(19): n is 5-[N-(1-naphthylmethyl)carboxyamide]-2'-deoxyuridine
  misc_feature (25)..(25): n is 5-[N-(1-naphthylmethyl)carboxyamide]-2'-deoxyuridine
  misc_feature (27)..(27): n is 5-[N-(1-naphthylmethyl)carboxyamide]-2'-deoxyuridine
  misc_feature (34)..(34): n is 5-[N-(1-naphthylmethyl)carboxyamide]-2'-deoxyuridine
  misc_feature (41)..(41): n is 5-[N-(1-naphthylmethyl)carboxyamide]-2'-deoxyuridine
  misc_feature (45)..(45): n is 5-[N-(1-naphthylmethyl)carboxyamide]-2'-deoxyuridine
ctgccncgacagcangnangcacancnagaggcnacccagngaangagga

SEQ ID NO: 411 - DNA, 47 bp, Artificial Sequence
  Synthetic
  misc_feature (3)..(3): n is 5-[N-(1-naphthylmethyl)carboxyamide]-2'-deoxyuridine
  misc_feature (12)..(12): n is 5-[N-(1-naphthylmethyl)carboxyamide]-2'-deoxyuridine
  misc_feature (14)..(14): n is 5-[N-(1-naphthylmethyl)carboxyamide]-2'-deoxyuridine
  misc_feature (16)..(16): n is 5-[N-(1-naphthylmethyl)carboxyamide]-2'-deoxyuridine
  misc_feature (22)..(22): n is 5-[N-(1-naphthylmethyl)carboxyamide]-2'-deoxyuridine
  misc_feature (24)..(24): n is 5-[N-(1-naphthylmethyl)carboxyamide]-2'-deoxyuridine
  misc_feature (31)..(31): n is 5-[N-(1-naphthylmethyl)carboxyamide]-2'-deoxyuridine
  misc_feature (38)..(38): n is 5-[N-(1-naphthylmethyl)carboxyamide]-2'-deoxyuridine
  misc_feature (42)..(42): n is 5-[N-(1-naphthylmethyl)carboxyamide]-2'-deoxyuridine
ccncgacagcangnangcacancnagaggcnacccagngaangagga

SEQ ID NO: 412 - DNA, 44 bp, Artificial Sequence
  Synthetic
  misc_feature (9)..(9): n is 5-[N-(1-naphthylmethyl)carboxyamide]-2'-deoxyuridine
  misc_feature (11)..(11): n is 5-[N-(1-naphthylmethyl)carboxyamide]-2'-deoxyuridine
  misc_feature (13)..(13): n is 5-[N-(1-naphthylmethyl)carboxyamide]-2'-deoxyuridine
  misc_feature (19)..(19): n is 5-[N-(1-naphthylmethyl)carboxyamide]-2'-deoxyuridine
  misc_feature (21)..(21): n is 5-[N-(1-naphthylmethyl)carboxyamide]-2'-deoxyuridine
  misc_feature (28)..(28): n is 5-[N-(1-naphthylmethyl)carboxyamide]-2'-deoxyuridine
  misc_feature (35)..(35): n is 5-[N-(1-naphthylmethyl)carboxyamide]-2'-deoxyuridine
  misc_feature (39)..(39): n is 5-[N-(1-naphthylmethyl)carboxyamide]-2'-deoxyuridine
cgacagcangnangcacancnagaggcnacccagngaangagga

SEQ ID NO: 413 - DNA, 41 bp, Artificial Sequence
  Synthetic
  misc_feature (6)..(6): n is 5-[N-(1-naphthylmethyl)carboxyamide]-2'-deoxyuridine
  misc_feature (8)..(8): n is 5-[N-(1-naphthylmethyl)carboxyamide]-2'-deoxyuridine
  misc_feature (10)..(10): n is 5-[N-(1-naphthylmethyl)carboxyamide]-2'-deoxyuridine
  misc_feature (16)..(16): n is 5-[N-(1-naphthylmethyl)carboxyamide]-2'-deoxyuridine
  misc_feature (18)..(18): n is 5-[N-(1-naphthylmethyl)carboxyamide]-2'-deoxyuridine
  misc_feature (25)..(25): n is 5-[N-(1-naphthylmethyl)carboxyamide]-2'-deoxyuridine
  misc_feature (32)..(32): n is 5-[N-(1-naphthylmethyl)carboxyamide]-2'-deoxyuridine
  misc_feature (36)..(36): n is 5-[N-(1-naphthylmethyl)carboxyamide]-2'-deoxyuridine
cagcangnangcacancnagaggcnacccagngaangagga

SEQ ID NO: 414 - DNA, 47 bp, Artificial Sequence
  Synthetic
  misc_feature (6)..(6): n is 5-[N-(1-naphthylmethyl)carboxyamide]-2'-deoxyuridine
  misc_feature (15)..(15): n is 5-[N-(1-naphthylmethyl)carboxyamide]-2'-deoxyuridine
  misc_feature (17)..(17): n is 5-[N-(1-naphthylmethyl)carboxyamide]-2'-deoxyuridine
  misc_feature (19)..(19): n is 5-[N-(1-naphthylmethyl)carboxyamide]-2'-deoxyuridine
  misc_feature (25)..(25): n is 5-[N-(1-naphthylmethyl)carboxyamide]-2'-deoxyuridine
  misc_feature (27)..(27): n is 5-[N-(1-naphthylmethyl)carboxyamide]-2'-deoxyuridine
  misc_feature (34)..(34): n is 5-[N-(1-naphthylmethyl)carboxyamide]-2'-deoxyuridine
  misc_feature (41)..(41): n is 5-[N-(1-naphthylmethyl)carboxyamide]-2'-deoxyuridine
  misc_feature (45)..(45): n is 5-[N-(1-naphthylmethyl)carboxyamide]-2'-deoxyuridine
ctgccncgacagcangnangcacancnagaggcnacccagngaanga

SEQ ID NO: 415 - DNA, 44 bp, Artificial Sequence
  Synthetic
  misc_feature (6)..(6): n is 5-[N-(1-naphthylmethyl)carboxyamide]-2'-deoxyuridine
  misc_feature (15)..(15): n is 5-[N-(1-naphthylmethyl)carboxyamide]-2'-deoxyuridine
  misc_feature (17)..(17): n is 5-[N-(1-naphthylmethyl)carboxyamide]-2'-deoxyuridine
  misc_feature (19)..(19): n is 5-[N-(1-naphthylmethyl)carboxyamide]-2'-deoxyuridine
  misc_feature (25)..(25): n is 5-[N-(1-naphthylmethyl)carboxyamide]-2'-deoxyuridine
  misc_feature (27)..(27): n is 5-[N-(1-naphthylmethyl)carboxyamide]-2'-deoxyuridine
  misc_feature (34)..(34): n is 5-[N-(1-naphthylmethyl)carboxyamide]-2'-deoxyuridine
  misc_feature (41)..(41): n is 5-[N-(1-naphthylmethyl)carboxyamide]-2'-deoxyuridine
ctgccncgacagcangnangcacancnagaggcnacccagngaa

SEQ ID NO: 416 - DNA, 41 bp, Artificial Sequence
  Synthetic
  misc_feature (6)..(6): n is 5-[N-(1-naphthylmethyl)carboxyamide]-2'-deoxyuridine
  misc_feature (15)..(15): n is 5-[N-(1-naphthylmethyl)carboxyamide]-2'-deoxyuridine
  misc_feature (17)..(17): n is 5-[N-(1-naphthylmethyl)carboxyamide]-2'-deoxyuridine
  misc_feature (19)..(19): n is 5-[N-(1-naphthylmethyl)carboxyamide]-2'-deoxyuridine
  misc_feature (25)..(25): n is 5-[N-(1-naphthylmethyl)carboxyamide]-2'-deoxyuridine
  misc_feature (27)..(27): n is 5-[N-(1-naphthylmethyl)carboxyamide]-2'-deoxyuridine
  misc_feature (34)..(34): n is 5-[N-(1-naphthylmethyl)carboxyamide]-2'-deoxyuridine
  misc_feature (41)..(41): n is 5-[N-(1-naphthylmethyl)carboxyamide]-2'-deoxyuridine
ctgccncgacagcangnangcacancnagaggcnacccagn

SEQ ID NO: 417 - DNA, 38 bp, Artificial Sequence
  Synthetic
  misc_feature (6)..(6): n is 5-[N-(1-naphthylmethyl)carboxyamide]-2'-deoxyuridine
  misc_feature (15)..(15): n is 5-[N-(1-naphthylmethyl)carboxyamide]-2'-deoxyuridine
  misc_feature (17)..(17): n is 5-[N-(1-naphthylmethyl)carboxyamide]-2'-deoxyuridine
  misc_feature (19)..(19): n is 5-[N-(1-naphthylmethyl)carboxyamide]-2'-deoxyuridine
  misc_feature (25)..(25): n is 5-[N-(1-naphthylmethyl)carboxyamide]-2'-deoxyuridine
  misc_feature (27)..(27): n is 5-[N-(1-naphthylmethyl)carboxyamide]-2'-deoxyuridine
  misc_feature (34)..(34): n is 5-[N-(1-naphthylmethyl)carboxyamide]-2'-deoxyuridine
ctgccncgacagcangnangcacancnagaggcnaccc

SEQ ID NO: 418 - DNA, 35 bp, Artificial Sequence
  Synthetic
  misc_feature (6)..(6): n is 5-[N-(1-naphthylmethyl)carboxyamide]-2'-deoxyuridine
  misc_feature (15)..(15): n is 5-[N-(1-naphthylmethyl)carboxyamide]-2'-deoxyuridine
  misc_feature (17)..(17): n is 5-[N-(1-naphthylmethyl)carboxyamide]-2'-deoxyuridine
  misc_feature (19)..(19): n is 5-[N-(1-naphthylmethyl)carboxyamide]-2'-deoxyuridine
  misc_feature (25)..(25): n is 5-[N-(1-naphthylmethyl)carboxyamide]-2'-deoxyuridine
  misc_feature (27)..(27): n is 5-[N-(1-naphthylmethyl)carboxyamide]-2'-deoxyuridine
  misc_feature (34)..(34): n is 5-[N-(1-naphthylmethyl)carboxyamide]-2'-deoxyuridine
ctgccncgacagcangnangcacancnagaggcna

SEQ ID NO: 419 - DNA, 38 bp, Artificial Sequence
  Synthetic
  misc_feature (9)..(9): n is 5-[N-(1-naphthylmethyl)carboxyamide]-2'-deoxyuridine
  misc_feature (11)..(11): n is 5-[N-(1-naphthylmethyl)carboxyamide]-2'-deoxyuridine
  misc_feature (13)..(13): n is 5-[N-(1-naphthylmethyl)carboxyamide]-2'-deoxyuridine
  misc_feature (19)..(19): n is 5-[N-(1-naphthylmethyl)carboxyamide]-2'-deoxyuridine
  misc_feature (21)..(21): n is 5-[N-(1-naphthylmethyl)carboxyamide]-2'-deoxyuridine
  misc_feature (28)..(28): n is 5-[N-(1-naphthylmethyl)carboxyamide]-2'-deoxyuridine
  misc_feature (35)..(35): n is 5-[N-(1-naphthylmethyl)carboxyamide]-2'-deoxyuridine
cgacagcangnangcacancnagaggcnacccagngaa

SEQ ID NO: 420 - DNA, 37 bp, Artificial Sequence
  Synthetic
  misc_feature (8)..(8): n is 5-[N-(1-naphthylmethyl)carboxyamide]-2'-deoxyuridine
  misc_feature (10)..(10): n is 5-[N-(1-naphthylmethyl)carboxyamide]-2'-deoxyuridine
  misc_feature (12)..(12): n is 5-[N-(1-naphthylmethyl)carboxyamide]-2'-deoxyuridine
  misc_feature (18)..(18): n is 5-[N-(1-naphthylmethyl)carboxyamide]-2'-deoxyuridine
  misc_feature (20)..(20): n is 5-[N-(1-naphthylmethyl)carboxyamide]-2'-deoxyuridine
  misc_feature (27)..(27): n is 5-[N-(1-naphthylmethyl)carboxyamide]-2'-deoxyuridine
  misc_feature (34)..(34): n is 5-[N-(1-naphthylmethyl)carboxyamide]-2'-deoxyuridine
gacagcangnangcacancnagaggcnacccagngaa

SEQ ID NO: 421 - DNA, 36 bp, Artificial Sequence
  Synthetic
  misc_feature (7)..(7): n is 5-[N-(1-naphthylmethyl)carboxyamide]-2'-deoxyuridine
  misc_feature (9)..(9): n is 5-[N-(1-naphthylmethyl)carboxyamide]-2'-deoxyuridine
  misc_feature (11)..(11): n is 5-[N-(1-naphthylmethyl)carboxyamide]-2'-deoxyuridine
  misc_feature (17)..(17): n is 5-[N-(1-naphthylmethyl)carboxyamide]-2'-deoxyuridine
  misc_feature (19)..(19): n is 5-[N-(1-naphthylmethyl)carboxyamide]-2'-deoxyuridine
  misc_feature (26)..(26): n is 5-[N-(1-naphthylmethyl)carboxyamide]-2'-deoxyuridine
  misc_feature (33)..(33): n is 5-[N-(1-naphthylmethyl)carboxyamide]-2'-deoxyuridine
acagcangnangcacancnagaggcnacccagngaa

SEQ ID NO: 422 - DNA, 37 bp, Artificial Sequence
  Synthetic
  misc_feature (9)..(9): n is 5-[N-(1-naphthylmethyl)carboxyamide]-2'-deoxyuridine
  misc_feature (11)..(11): n is 5-[N-(1-naphthylmethyl)carboxyamide]-2'-deoxyuridine
  misc_feature (13)..(13): n is 5-[N-(1-naphthylmethyl)carboxyamide]-2'-deoxyuridine
  misc_feature (19)..(19): n is 5-[N-(1-naphthylmethyl)carboxyamide]-2'-deoxyuridine
  misc_feature (21)..(21): n is 5-[N-(1-naphthylmethyl)carboxyamide]-2'-deoxyuridine
  misc_feature (28)..(28): n is 5-[N-(1-naphthylmethyl)carboxyamide]-2'-deoxyuridine
  misc_feature (35)..(35): n is 5-[N-(1-naphthylmethyl)carboxyamide]-2'-deoxyuridine
cgacagcangnangcacancnagaggcnacccagnga

SEQ ID NO: 423 - DNA, 36 bp, Artificial Sequence
  Synthetic
  misc_feature (9)..(9): n is 5-[N-(1-naphthylmethyl)carboxyamide]-2'-deoxyuridine
  misc_feature (11)..(11): n is 5-[N-(1-naphthylmethyl)carboxyamide]-2'-deoxyuridine
  misc_feature (13)..(13): n is 5-[N-(1-naphthylmethyl)carboxyamide]-2'-deoxyuridine
  misc_feature (19)..(19): n is 5-[N-(1-naphthylmethyl)carboxyamide]-2'-deoxyuridine
  misc_feature (21)..(21): n is 5-[N-(1-naphthylmethyl)carboxyamide]-2'-deoxyuridine
  misc_feature (28)..(28): n is 5-[N-(1-naphthylmethyl)carboxyamide]-2'-deoxyuridine
  misc_feature (35)..(35): n is 5-[N-(1-naphthylmethyl)carboxyamide]-2'-deoxyuridine
cgacagcangnangcacancnagaggcnacccagng

SEQ ID NO: 424 - DNA, 35 bp, Artificial Sequence
  Synthetic
  misc_feature (9)..(9): n is 5-[N-(1-naphthylmethyl)carboxyamide]-2'-deoxyuridine
  misc_feature (11)..(11): n is 5-[N-(1-naphthylmethyl)carboxyamide]-2'-deoxyuridine
  misc_feature (13)..(13): n is 5-[N-(1-naphthylmethyl)carboxyamide]-2'-deoxyuridine
  misc_feature (19)..(19): n is 5-[N-(1-naphthylmethyl)carboxyamide]-2'-deoxyuridine
  misc_feature (21)..(21): n is 5-[N-(1-naphthylmethyl)carboxyamide]-2'-deoxyuridine
  misc_feature (28)..(28): n is 5-[N-(1-naphthylmethyl)carboxyamide]-2'-deoxyuridine
  misc_feature (35)..(35): n is 5-[N-(1-naphthylmethyl)carboxyamide]-2'-deoxyuridine
cgacagcangnangcacancnagaggcnacccagn

SEQ ID NO: 425 - DNA, 29 bp, Artificial Sequence
  Synthetic
  misc_feature (9)..(9): n is 5-[N-(1-naphthylmethyl)carboxyamide]-2'-deoxyuridine
  misc_feature (11)..(11): n is 5-[N-(1-naphthylmethyl)carboxyamide]-2'-deoxyuridine
  misc_feature (13)..(13): n is 5-[N-(1-naphthylmethyl)carboxyamide]-2'-deoxyuridine
  misc_feature (19)..(19): n is 5-[N-(1-naphthylmethyl)carboxyamide]-2'-deoxyuridine
  misc_feature (21)..(21): n is 5-[N-(1-naphthylmethyl)carboxyamide]-2'-deoxyuridine
  misc_feature (28)..(28): n is 5-[N-(1-naphthylmethyl)carboxyamide]-2'-deoxyuridine
cgacagcangnangcacancnagaggcna

SEQ ID NO: 426 - DNA, 28 bp, Artificial Sequence
  Synthetic
  misc_feature (9)..(9): n is 5-[N-(1-naphthylmethyl)carboxyamide]-2'-deoxyuridine
  misc_feature (11)..(11): n is 5-[N-(1-naphthylmethyl)carboxyamide]-2'-deoxyuridine
  misc_feature (13)..(13): n is 5-[N-(1-naphthylmethyl)carboxyamide]-2'-deoxyuridine
  misc_feature (19)..(19): n is 5-[N-(1-naphthylmethyl)carboxyamide]-2'-deoxyuridine
  misc_feature (21)..(21): n is 5-[N-(1-naphthylmethyl)carboxyamide]-2'-deoxyuridine
  misc_feature (28)..(28): n is 5-[N-(1-naphthylmethyl)carboxyamide]-2'-deoxyuridine
cgacagcangnangcacancnagaggcn

SEQ ID NO: 427 - DNA, 27 bp, Artificial Sequence
  Synthetic
  misc_feature (9)..(9): n is 5-[N-(1-naphthylmethyl)carboxyamide]-2'-deoxyuridine
  misc_feature (11)..(11): n is 5-[N-(1-naphthylmethyl)carboxyamide]-2'-deoxyuridine
  misc_feature (13)..(13): n is 5-[N-(1-naphthylmethyl)carboxyamide]-2'-deoxyuridine
  misc_feature (19)..(19): n is 5-[N-(1-naphthylmethyl)carboxyamide]-2'-deoxyuridine
  misc_feature (21)..(21): n is 5-[N-(1-naphthylmethyl)carboxyamide]-2'-deoxyuridine
cgacagcangnangcacancnagaggc

SEQ ID NO: 428 - DNA, 26 bp, Artificial Sequence
  Synthetic
  misc_feature (9)..(9): n is 5-[N-(1-naphthylmethyl)carboxyamide]-2'-deoxyuridine
  misc_feature (11)..(11): n is 5-[N-(1-naphthylmethyl)carboxyamide]-2'-deoxyuridine
  misc_feature (13)..(13): n is 5-[N-(1-naphthylmethyl)carboxyamide]-2'-deoxyuridine
  misc_feature (19)..(19): n is 5-[N-(1-naphthylmethyl)carboxyamide]-2'-deoxyuridine
  misc_feature (21)..(21): n is 5-[N-(1-naphthylmethyl)carboxyamide]-2'-deoxyuridine
cgacagcangnangcacancnagagg

SEQ ID NO: 429 - DNA, 25 bp, Artificial Sequence
  Synthetic
  misc_feature (9)..(9): n is 5-[N-(1-naphthylmethyl)carboxyamide]-2'-deoxyuridine
  misc_feature (11)..(11): n is 5-[N-(1-naphthylmethyl)carboxyamide]-2'-deoxyuridine
  misc_feature (13)..(13): n is 5-[N-(1-naphthylmethyl)carboxyamide]-2'-deoxyuridine
  misc_feature (19)..(19): n is 5-[N-(1-naphthylmethyl)carboxyamide]-2'-deoxyuridine
  misc_feature (21)..(21): n is 5-[N-(1-naphthylmethyl)carboxyamide]-2'-deoxyuridine
cgacagcangnangcacancnagag

SEQ ID NO: 430 - DNA, 24 bp, Artificial Sequence
  Synthetic
  misc_feature (9)..(9): n is 5-[N-(1-naphthylmethyl)carboxyamide]-2'-deoxyuridine
  misc_feature (11)..(11): n is 5-[N-(1-naphthylmethyl)carboxyamide]-2'-deoxyuridine
  misc_feature (13)..(13): n is 5-[N-(1-naphthylmethyl)carboxyamide]-2'-deoxyuridine
  misc_feature (19)..(19): n is 5-[N-(1-naphthylmethyl)carboxyamide]-2'-deoxyuridine
  misc_feature (21)..(21): n is 5-[N-(1-naphthylmethyl)carboxyamide]-2'-deoxyuridine
cgacagcangnangcacancnaga

SEQ ID NO: 431 - DNA, 23 bp, Artificial Sequence
  Synthetic
  misc_feature (9)..(9): n is 5-[N-(1-naphthylmethyl)carboxyamide]-2'-deoxyuridine
  misc_feature (11)..(11): n is 5-[N-(1-naphthylmethyl)carboxyamide]-2'-deoxyuridine
  misc_feature (13)..(13): n is 5-[N-(1-naphthylmethyl)carboxyamide]-2'-deoxyuridine
  misc_feature (19)..(19): n is 5-[N-(1-naphthylmethyl)carboxyamide]-2'-deoxyuridine
  misc_feature (21)..(21): n is 5-[N-(1-naphthylmethyl)carboxyamide]-2'-deoxyuridine
cgacagcangnangcacancnag

SEQ ID NO: 432 - DNA, 22 bp, Artificial Sequence
  Synthetic
  misc_feature (9)..(9): n is 5-[N-(1-naphthylmethyl)carboxyamide]-2'-deoxyuridine
  misc_feature (11)..(11): n is 5-[N-(1-naphthylmethyl)carboxyamide]-2'-deoxyuridine
  misc_feature (13)..(13): n is 5-[N-(1-naphthylmethyl)carboxyamide]-2'-deoxyuridine
  misc_feature (19)..(19): n is 5-[N-(1-naphthylmethyl)carboxyamide]-2'-deoxyuridine
  misc_feature (21)..(21): n is 5-[N-(1-naphthylmethyl)carboxyamide]-2'-deoxyuridine
cgacagcangnangcacancna

SEQ ID NO: 433 - DNA, 21 bp, Artificial Sequence
  Synthetic
  misc_feature (9)..(9): n is 5-[N-(1-naphthylmethyl)carboxyamide]-2'-deoxyuridine
  misc_feature (11)..(11): n is 5-[N-(1-naphthylmethyl)carboxyamide]-2'-deoxyuridine
  misc_feature (13)..(13): n is 5-[N-(1-naphthylmethyl)carboxyamide]-2'-deoxyuridine
  misc_feature (19)..(19): n is 5-[N-(1-naphthylmethyl)carboxyamide]-2'-deoxyuridine
  misc_feature (21)..(21): n is 5-[N-(1-naphthylmethyl)carboxyamide]-2'-deoxyuridine
cgacagcangnangcacancn

SEQ ID NO: 434 - DNA, 23 bp, Artificial Sequence
  Synthetic
  misc_feature (8)..(8): n is 5-[N-(1-naphthylmethyl)carboxyamide]-2'-deoxyuridine
  misc_feature (10)..(10): n is 5-[N-(1-naphthylmethyl)carboxyamide]-2'-deoxyuridine
  misc_feature (12)..(12): n is 5-[N-(1-naphthylmethyl)carboxyamide]-2'-deoxyuridine
  misc_feature (18)..(18): n is 5-[N-(1-naphthylmethyl)carboxyamide]-2'-deoxyuridine
  misc_feature (20)..(20): n is 5-[N-(1-naphthylmethyl)carboxyamide]-2'-deoxyuridine
gacagcangnangcacancnaga

SEQ ID NO: 435 - DNA, 22 bp, Artificial Sequence
  Synthetic
  misc_feature (8)..(8): n is 5-[N-(1-naphthylmethyl)carboxyamide]-2'-deoxyuridine
  misc_feature (10)..(10): n is 5-[N-(1-naphthylmethyl)carboxyamide]-2'-deoxyuridine
  misc_feature (12)..(12): n is 5-[N-(1-naphthylmethyl)carboxyamide]-2'-deoxyuridine
  misc_feature (18)..(18): n is 5-[N-(1-naphthylmethyl)carboxyamide]-2'-deoxyuridine
  misc_feature (20)..(20): n is 5-[N-(1-naphthylmethyl)carboxyamide]-2'-deoxyuridine
gacagcangnangcacancnag

SEQ ID NO: 436 - DNA, 21 bp, Artificial Sequence
  Synthetic
  misc_feature (8)..(8): n is 5-[N-(1-naphthylmethyl)carboxyamide]-2'-deoxyuridine
  misc_feature (10)..(10): n is 5-[N-(1-naphthylmethyl)carboxyamide]-2'-deoxyuridine
  misc_feature (12)..(12): n is 5-[N-(1-naphthylmethyl)carboxyamide]-2'-deoxyuridine
  misc_feature (18)..(18): n is 5-[N-(1-naphthylmethyl)carboxyamide]-2'-deoxyuridine
  misc_feature (20)..(20): n is 5-[N-(1-naphthylmethyl)carboxyamide]-2'-deoxyuridine
gacagcangnangcacancna

SEQ ID NO: 437 - DNA, 20 bp, Artificial Sequence
  Synthetic
  misc_feature (8)..(8): n is 5-[N-(1-naphthylmethyl)carboxyamide]-2'-deoxyuridine
  misc_feature (10)..(10): n is 5-[N-(1-naphthylmethyl)carboxyamide]-2'-deoxyuridine
  misc_feature (12)..(12): n is 5-[N-(1-naphthylmethyl)carboxyamide]-2'-deoxyuridine
  misc_feature (18)..(18): n is 5-[N-(1-naphthylmethyl)carboxyamide]-2'-deoxyuridine
  misc_feature (20)..(20): n is 5-[N-(1-naphthylmethyl)carboxyamide]-2'-deoxyuridine
gacagcangnangcacancn

SEQ ID NO: 438 - DNA, 24 bp, Artificial Sequence
  Synthetic
  misc_feature (8)..(8): n is 5-[N-(1-naphthylmethyl)carboxyamide]-2'-deoxyuridine
  misc_feature (10)..(10): n is 5-[N-(1-naphthylmethyl)carboxyamide]-2'-deoxyuridine
  misc_feature (12)..(12): n is 5-[N-(1-naphthylmethyl)carboxyamide]-2'-deoxyuridine
  misc_feature (18)..(18): n is 5-[N-(1-naphthylmethyl)carboxyamide]-2'-deoxyuridine
  misc_feature (20)..(20): n is 5-[N-(1-naphthylmethyl)carboxyamide]-2'-deoxyuridine
gacagcangnangcacancnagag

SEQ ID NO: 439 - DNA, 21 bp, Artificial Sequence
  Synthetic
  misc_feature (1)..(1): n is 1,3-propane diol
  misc_feature (9)..(9): n is 5-[N-(1-naphthylmethyl)carboxyamide]-2'-deoxyuridine
  misc_feature (11)..(11): n is 5-[N-(1-naphthylmethyl)carboxyamide]-2'-deoxyuridine
  misc_feature (13)..(13): n is 5-[N-(1-naphthylmethyl)carboxyamide]-2'-deoxyuridine
  misc_feature (19)..(19): n is 5-[N-(1-naphthylmethyl)carboxyamide]-2'-deoxyuridine
  misc_feature (21)..(21): n is 5-[N-(1-naphthylmethyl)carboxyamide]-2'-deoxyuridine
ngacagcangnangcacancn

SEQ ID NO: 440 - DNA, 21 bp, Artificial Sequence
  Synthetic
  misc_feature (2)..(2): n is 1,3-propane diol
  misc_feature (9)..(9): n is 5-[N-(1-naphthylmethyl)carboxyamide]-2'-deoxyuridine
  misc_feature (11)..(11): n is 5-[N-(1-naphthylmethyl)carboxyamide]-2'-deoxyuridine
  misc_feature (13)..(13): n is 5-[N-(1-naphthylmethyl)carboxyamide]-2'-deoxyuridine
  misc_feature (19)..(19): n is 5-[N-(1-naphthylmethyl)carboxyamide]-2'-deoxyuridine
  misc_feature (21)..(21): n is 5-[N-(1-naphthylmethyl)carboxyamide]-2'-deoxyuridine
cnacagcangnangcacancn

SEQ ID NO: 441 - DNA, 21 bp, Artificial Sequence
  Synthetic
  misc_feature (3)..(3): n is 1,3-propane diol
  misc_feature (9)..(9): n is 5-[N-(1-naphthylmethyl)carboxyamide]-2'-deoxyuridine
  misc_feature (11)..(11): n is 5-[N-(1-naphthylmethyl)carboxyamide]-2'-deoxyuridine
  misc_feature (13)..(13): n is 5-[N-(1-naphthylmethyl)carboxyamide]-2'-deoxyuridine
  misc_feature (19)..(19): n is 5-[N-(1-naphthylmethyl)carboxyamide]-2'-deoxyuridine
  misc_feature (21)..(21): n is 5-[N-(1-naphthylmethyl)carboxyamide]-2'-deoxyuridine
cgncagcangnangcacancn

SEQ ID NO: 442 - DNA, 21 bp, Artificial Sequence
  Synthetic
  misc_feature (4)..(4): n is 1,3-propane diol
  misc_feature (9)..(9): n is 5-[N-(1-naphthylmethyl)carboxyamide]-2'-deoxyuridine
  misc_feature (11)..(11): n is 5-[N-(1-naphthylmethyl)carboxyamide]-2'-deoxyuridine
  misc_feature (13)..(13): n is 5-[N-(1-naphthylmethyl)carboxyamide]-2'-deoxyuridine
  misc_feature (19)..(19): n is 5-[N-(1-naphthylmethyl)carboxyamide]-2'-deoxyuridine
  misc_feature (21)..(21): n is 5-[N-(1-naphthylmethyl)carboxyamide]-2'-deoxyuridine
cganagcangnangcacancn

SEQ ID NO: 443 - DNA, 21 bp, Artificial Sequence
  Synthetic
  misc_feature (5)..(5): n is 1,3-propane diol
  misc_feature (9)..(9): n is 5-[N-(1-naphthylmethyl)carboxyamide]-2'-deoxyuridine
  misc_feature (11)..(11): n is 5-[N-(1-naphthylmethyl)carboxyamide]-2'-deoxyuridine
  misc_feature (13)..(13): n is 5-[N-(1-naphthylmethyl)carboxyamide]-2'-deoxyuridine
  misc_feature (19)..(19): n is 5-[N-(1-naphthylmethyl)carboxyamide]-2'-deoxyuridine
  misc_feature (21)..(21): n is 5-[N-(1-naphthylmethyl)carboxyamide]-2'-deoxyuridine
cgacngcangnangcacancn

SEQ ID NO: 444 - DNA, 21 bp, Artificial Sequence
  Synthetic
  misc_feature (6)..(6): n is 1,3-propane diol
  misc_feature (9)..(9): n is 5-[N-(1-naphthylmethyl)carboxyamide]-2'-deoxyuridine
  misc_feature (11)..(11): n is 5-[N-(1-naphthylmethyl)carboxyamide]-2'-deoxyuridine
  misc_feature (13)..(13): n is 5-[N-(1-naphthylmethyl)carboxyamide]-2'-deoxyuridine
  misc_feature (19)..(19): n is 5-[N-(1-naphthylmethyl)carboxyamide]-2'-deoxyuridine
  misc_feature (21)..(21): n is 5-[N-(1-naphthylmethyl)carboxyamide]-2'-deoxyuridine
cgacancangnangcacancn

SEQ ID NO: 445 - DNA, 21 bp, Artificial Sequence
  Synthetic
  misc_feature (7)..(7): n is 1,3-propane diol
  misc_feature (9)..(9): n is 5-[N-(1-naphthylmethyl)carboxyamide]-2'-deoxyuridine
  misc_feature (11)..(11): n is 5-[N-(1-naphthylmethyl)carboxyamide]-2'-deoxyuridine
  misc_feature (13)..(13): n is 5-[N-(1-naphthylmethyl)carboxyamide]-2'-deoxyuridine
  misc_feature (19)..(19): n is 5-[N-(1-naphthylmethyl)carboxyamide]-2'-deoxyuridine
  misc_feature (21)..(21): n is 5-[N-(1-naphthylmethyl)carboxyamide]-2'-deoxyuridine
cgacagnangnangcacancn

SEQ ID NO: 446 - DNA, 21 bp, Artificial Sequence
  Synthetic
  misc_feature (8)..(8): n is 1,3-propane diol
  misc_feature (9)..(9): n is 5-[N-(1-naphthylmethyl)carboxyamide]-2'-deoxyuridine
  misc_feature (11)..(11): n is 5-[N-(1-naphthylmethyl)carboxyamide]-2'-deoxyuridine
  misc_feature (13)..(13): n is 5-[N-(1-naphthylmethyl)carboxyamide]-2'-deoxyuridine
  misc_feature (19)..(19): n is 5-[N-(1-naphthylmethyl)carboxyamide]-2'-deoxyuridine
  misc_feature (21)..(21): n is 5-[N-(1-naphthylmethyl)carboxyamide]-2'-deoxyuridine
cgacagcnngnangcacancn

SEQ ID NO: 447 - DNA, 21 bp, Artificial Sequence
  Synthetic
  misc_feature (9)..(9): n is 1,3-propane diol
  misc_feature (11)..(11): n is 5-[N-(1-naphthylmethyl)carboxyamide]-2'-deoxyuridine
  misc_feature (13)..(13): n is 5-[N-(1-naphthylmethyl)carboxyamide]-2'-deoxyuridine
  misc_feature (19)..(19): n is 5-[N-(1-naphthylmethyl)carboxyamide]-2'-deoxyuridine
  misc_feature (21)..(21): n is 5-[N-(1-naphthylmethyl)carboxyamide]-2'-deoxyuridine
cgacagcangnangcacancn

SEQ ID NO: 448 - DNA, 21 bp, Artificial Sequence
  Synthetic
  misc_feature (9)..(9): n is 5-[N-(1-naphthylmethyl)carboxyamide]-2'-deoxyuridine
  misc_feature (10)..(10): n is 1,3-propane diol
  misc_feature (11)..(11): n is 5-[N-(1-naphthylmethyl)carboxyamide]-2'-deoxyuridine
  misc_feature (13)..(13): n is 5-[N-(1-naphthylmethyl)carboxyamide]-2'-deoxyuridine
  misc_feature (19)..(19): n is 5-[N-(1-naphthylmethyl)carboxyamide]-2'-deoxyuridine
  misc_feature (21)..(21): n is 5-[N-(1-naphthylmethyl)carboxyamide]-2'-deoxyuridine
cgacagcannnangcacancn

SEQ ID NO: 449 - DNA, 21 bp, Artificial Sequence
  Synthetic
  misc_feature (9)..(9): n is 5-[N-(1-naphthylmethyl)carboxyamide]-2'-deoxyuridine
  misc_feature (11)..(11): n is 1,3-propane diol
  misc_feature (13)..(13): n is 5-[N-(1-naphthylmethyl)carboxyamide]-2'-deoxyuridine
  misc_feature (19)..(19): n is 5-[N-(1-naphthylmethyl)carboxyamide]-2'-deoxyuridine
  misc_feature (21)..(21): n is 5-[N-(1-naphthylmethyl)carboxyamide]-2'-deoxyuridine
cgacagcangnangcacancn

SEQ ID NO: 450 - DNA, 21 bp, Artificial Sequence
  Synthetic
  misc_feature (9)..(9): n is 5-[N-(1-naphthylmethyl)carboxyamide]-2'-deoxyuridine
  misc_feature (11)..(11): n is 5-[N-(1-naphthylmethyl)carboxyamide]-2'-deoxyuridine
  misc_feature (12)..(12): n is 1,3-propane diol
  misc_feature (13)..(13): n is 5-[N-(1-naphthylmethyl)carboxyamide]-2'-deoxyuridine
  misc_feature (19)..(19): n is 5-[N-(1-naphthylmethyl)carboxyamide]-2'-deoxyuridine
  misc_feature (21)..(21): n is 5-[N-(1-naphthylmethyl)carboxyamide]-2'-deoxyuridine
cgacagcangnnngcacancn

SEQ ID NO: 451 - DNA, 21 bp, Artificial Sequence
  Synthetic
  misc_feature (9)..(9): n is 5-[N-(1-naphthylmethyl)carboxyamide]-2'-deoxyuridine
  misc_feature (11)..(11): n is 5-[N-(1-naphthylmethyl)carboxyamide]-2'-deoxyuridine
  misc_feature (13)..(13): n is 1,3-propane diol
  misc_feature (19)..(19): n is 5-[N-(1-naphthylmethyl)carboxyamide]-2'-deoxyuridine
  misc_feature (21)..(21): n is 5-[N-(1-naphthylmethyl)carboxyamide]-2'-deoxyuridine
cgacagcangnangcacancn

SEQ ID NO: 452 - DNA, 21 bp, Artificial Sequence
  Synthetic
  misc_feature (9)..(9): n is 5-[N-(1-naphthylmethyl)carboxyamide]-2'-deoxyuridine
  misc_feature (11)..(11): n is 5-[N-(1-naphthylmethyl)carboxyamide]-2'-deoxyuridine
  misc_feature (13)..(13): n is 5-[N-(1-naphthylmethyl)carboxyamide]-2'-deoxyuridine
  misc_feature (14)..(14): n is 1,3-propane diol
  misc_feature (19)..(19): n is 5-[N-(1-naphthylmethyl)carboxyamide]-2'-deoxyuridine
  misc_feature (21)..(21): n is 5-[N-(1-naphthylmethyl)carboxyamide]-2'-deoxyuridine
cgacagcangnanncacancn

SEQ ID NO: 453 - DNA, 21 bp, Artificial Sequence
  Synthetic
  misc_feature (9)..(9): n is 5-[N-(1-naphthylmethyl)carboxyamide]-2'-deoxyuridine
  misc_feature (11)..(11): n is 5-[N-(1-naphthylmethyl)carboxyamide]-2'-deoxyuridine
  misc_feature (13)..(13): n is 5-[N-(1-naphthylmethyl)carboxyamide]-2'-deoxyuridine
  misc_feature (15)..(15): n is 1,3-propane diol
  misc_feature (19)..(19): n is 5-[N-(1-naphthylmethyl)carboxyamide]-2'-deoxyuridine
  misc_feature (21)..(21): n is 5-[N-(1-naphthylmethyl)carboxyamide]-2'-deoxyuridine
cgacagcangnangnacancn

SEQ ID NO: 454 - DNA, 21 bp, Artificial Sequence
  Synthetic
  misc_feature (9)..(9): n is 5-[N-(1-naphthylmethyl)carboxyamide]-2'-deoxyuridine
  misc_feature (11)..(11): n is 5-[N-(1-naphthylmethyl)carboxyamide]-2'-deoxyuridine
  misc_feature (13)..(13): n is 5-[N-(1-naphthylmethyl)carboxyamide]-2'-deoxyuridine
  misc_feature (16)..(16): n is 1,3-propane diol
  misc_feature (19)..(19): n is 5-[N-(1-naphthylmethyl)carboxyamide]-2'-deoxyuridine
  misc_feature (21)..(21): n is 5-[N-(1-naphthylmethyl)carboxyamide]-2'-deoxyuridine
cgacagcangnangcncancn

SEQ ID NO: 455 - DNA, 21 bp, Artificial Sequence
  Synthetic
  misc_feature (9)..(9): n is 5-[N-(1-naphthylmethyl)carboxyamide]-2'-deoxyuridine
  misc_feature (11)..(11): n is 5-[N-(1-naphthylmethyl)carboxyamide]-2'-deoxyuridine
  misc_feature (13)..(13): n is 5-[N-(1-naphthylmethyl)carboxyamide]-2'-deoxyuridine
  misc_feature (17)..(17): n is 1,3-propane diol
  misc_feature (19)..(19): n is 5-[N-(1-naphthylmethyl)carboxyamide]-2'-deoxyuridine
  misc_feature (21)..(21): n is 5-[N-(1-naphthylmethyl)carboxyamide]-2'-deoxyuridine
cgacagcangnangcanancn

SEQ ID NO: 456 - DNA, 21 bp, Artificial Sequence
  Synthetic
  misc_feature (9)..(9): n is 5-[N-(1-naphthylmethyl)carboxyamide]-2'-deoxyuridine
  misc_feature (11)..(11): n is 5-[N-(1-naphthylmethyl)carboxyamide]-2'-deoxyuridine
  misc_feature (13)..(13): n is 5-[N-(1-naphthylmethyl)carboxyamide]-2'-deoxyuridine
  misc_feature (18)..(18): n is 1,3-propane diol
  misc_feature (19)..(19): n is 5-[N-(1-naphthylmethyl)carboxyamide]-2'-deoxyuridine
  misc_feature (21)..(21): n is 5-[N-(1-naphthylmethyl)carboxyamide]-2'-deoxyuridine
cgacagcangnangcacnncn

SEQ ID NO: 457 - DNA, 21 bp, Artificial Sequence
  Synthetic
  misc_feature (9)..(9): n is 5-[N-(1-naphthylmethyl)carboxyamide]-2'-deoxyuridine
  misc_feature (11)..(11): n is 5-[N-(1-naphthylmethyl)carboxyamide]-2'-deoxyuridine
  misc_feature (13)..(13): n is 5-[N-(1-naphthylmethyl)carboxyamide]-2'-deoxyuridine
  misc_feature (19)..(19): n is 1,3-propane diol
  misc_feature (21)..(21): n is 5-[N-(1-naphthylmethyl)carboxyamide]-2'-deoxyuridine
cgacagcangnangcacancn

SEQ ID NO: 458 - DNA, 21 bp, Artificial Sequence
  Synthetic
  misc_feature (9)..(9): n is 5-[N-(1-naphthylmethyl)carboxyamide]-2'-deoxyuridine
  misc_feature (11)..(11): n is 5-[N-(1-naphthylmethyl)carboxyamide]-2'-deoxyuridine
  misc_feature (13)..(13): n is 5-[N-(1-naphthylmethyl)carboxyamide]-2'-deoxyuridine
  misc_feature (19)..(19): n is 5-[N-(1-naphthylmethyl)carboxyamide]-2'-deoxyuridine
  misc_feature (20)..(20): n is 1,3-propane diol
  misc_feature (21)..(21): n is 5-[N-(1-naphthylmethyl)carboxyamide]-2'-deoxyuridine
cgacagcangnangcacannn

SEQ ID NO: 459 - DNA, 21 bp, Artificial Sequence
  Synthetic
  misc_feature (9)..(9): n is 5-[N-(1-naphthylmethyl)carboxyamide]-2'-deoxyuridine
  misc_feature (11)..(11): n is 5-[N-(1-naphthylmethyl)carboxyamide]-2'-deoxyuridine
  misc_feature (13)..(13): n is 5-[N-(1-naphthylmethyl)carboxyamide]-2'-deoxyuridine
  misc_feature (19)..(19): n is 5-[N-(1-naphthylmethyl)carboxyamide]-2'-deoxyuridine
  misc_feature (21)..(21): n is 1,3-propane diol
cgacagcangnangcacancn

SEQ ID NO: 460 - DNA, 21 bp, Artificial Sequence
  Synthetic
  misc_feature (1)..(1): n is 2'-O-methyl-cytidine
  misc_feature (9)..(9): n is 5-[N-(1-naphthylmethyl)carboxyamide]-2'-deoxyuridine
  misc_feature (11)..(11): n is 5-[N-(1-naphthylmethyl)carboxyamide]-2'-deoxyuridine
  misc_feature (13)..(13): n is 5-[N-(1-naphthylmethyl)carboxyamide]-2'-deoxyuridine
  misc_feature (19)..(19): n is 5-[N-(1-naphthylmethyl)carboxyamide]-2'-deoxyuridine
  misc_feature (21)..(21): n is 5-[N-(1-naphthylmethyl)carboxyamide]-2'-deoxyuridine
ngacagcangnangcacancn

SEQ ID NO: 461 - DNA, 21 bp, Artificial Sequence
  Synthetic
  misc_feature (4)..(4): n is 2'-O-methyl-cytidine
  misc_feature (9)..(9): n is 5-[N-(1-naphthylmethyl)carboxyamide]-2'-deoxyuridine
  misc_feature (11)..(11): n is 5-[N-(1-naphthylmethyl)carboxyamide]-2'-deoxyuridine
  misc_feature (13)..(13): n is 5-[N-(1-naphthylmethyl)carboxyamide]-2'-deoxyuridine
  misc_feature (19)..(19): n is 5-[N-(1-naphthylmethyl)carboxyamide]-2'-deoxyuridine
  misc_feature (21)..(21): n is 5-[N-(1-naphthylmethyl)carboxyamide]-2'-deoxyuridine
cganagcangnangcacancn

SEQ ID NO: 462 - DNA, 21 bp, Artificial Sequence
  Synthetic
  misc_feature (7)..(7): n is 2'-O-methyl-cytidine
  misc_feature (9)..(9): n is 5-[N-(1-naphthylmethyl)carboxyamide]-2'-deoxyuridine
  misc_feature (11)..(11): n is 5-[N-(1-naphthylmethyl)carboxyamide]-2'-deoxyuridine
  misc_feature (13)..(13): n is 5-[N-(1-naphthylmethyl)carboxyamide]-2'-deoxyuridine
  misc_feature (19)..(19): n is 5-[N-(1-naphthylmethyl)carboxyamide]-2'-deoxyuridine
  misc_feature (21)..(21): n is 5-[N-(1-naphthylmethyl)carboxyamide]-2'-deoxyuridine
cgacagnangnangcacancn

SEQ ID NO: 463 - DNA, 21 bp, Artificial Sequence
  Synthetic
  misc_feature (9)..(9): n is 5-[N-(1-naphthylmethyl)carboxyamide]-2'-deoxyuridine
  misc_feature (11)..(11): n is 5-[N-(1-naphthylmethyl)carboxyamide]-2'-deoxyuridine
  misc_feature (13)..(13): n is 5-[N-(1-naphthylmethyl)carboxyamide]-2'-deoxyuridine
  misc_feature (15)..(15): n is 2'-O-methyl-cytidine
  misc_feature (19)..(19): n is 5-[N-(1-naphthylmethyl)carboxyamide]-2'-deoxyuridine
  misc_feature (21)..(21): n is 5-[N-(1-naphthylmethyl)carboxyamide]-2'-deoxyuridine
cgacagcangnangnacancn

SEQ ID NO: 464 - DNA, 21 bp, Artificial Sequence
  Synthetic
  misc_feature (9)..(9): n is 5-[N-(1-naphthylmethyl)carboxyamide]-2'-deoxyuridine
  misc_feature (11)..(11): n is 5-[N-(1-naphthylmethyl)carboxyamide]-2'-deoxyuridine
  misc_feature (13)..(13): n is 5-[N-(1-naphthylmethyl)carboxyamide]-2'-deoxyuridine
  misc_feature (17)..(17): n is 2'-O-methyl-cytidine
  misc_feature (19)..(19): n is 5-[N-(1-naphthylmethyl)carboxyamide]-2'-deoxyuridine
  misc_feature (21)..(21): n is 5-[N-(1-naphthylmethyl)carboxyamide]-2'-deoxyuridine
cgacagcangnangcanancn

SEQ ID NO: 465 - DNA, 21 bp, Artificial Sequence
  Synthetic
  misc_feature (9)..(9): n is 5-[N-(1-naphthylmethyl)carboxyamide]-2'-deoxyuridine
  misc_feature (11)..(11): n is 5-[N-(1-naphthylmethyl)carboxyamide]-2'-deoxyuridine
  misc_feature (13)..(13): n is 5-[N-(1-naphthylmethyl)carboxyamide]-2'-deoxyuridine
  misc_feature (19)..(19): n is 5-[N-(1-naphthylmethyl)carboxyamide]-2'-deoxyuridine
  misc_feature (20)..(20): n is 2'-O-methyl-cytidine
  misc_feature (21)..(21): n is 5-[N-(1-naphthylmethyl)carboxyamide]-2'-deoxyuridine
cgacagcangnangcacannn

SEQ ID NO: 466 - DNA, 21 bp, Artificial Sequence
  Synthetic
  misc_feature (2)..(2): n is 2'-deoxyguanosine-3'-phosphorothioate
  misc_feature (2)..(2): n is 2'-O-methyl-guanosine
  misc_feature (9)..(9): n is 5-[N-(1-naphthylmethyl)carboxyamide]-2'-deoxyuridine
  misc_feature (11)..(11): n is 5-[N-(1-naphthylmethyl)carboxyamide]-2'-deoxyuridine
  misc_feature (13)..(13): n is 5-[N-(1-naphthylmethyl)carboxyamide]-2'-deoxyuridine
  misc_feature (19)..(19): n is 5-[N-(1-naphthylmethyl)carboxyamide]-2'-deoxyuridine
  misc_feature (21)..(21): n is 5-[N-(1-naphthylmethyl)carboxyamide]-2'-deoxyuridine
cnacagcangnangcacancn

SEQ ID NO: 467 - DNA, 21 bp, Artificial Sequence
  Synthetic
  misc_feature (6)..(6): n is 2'-O-methyl-guanosine
  misc_feature (9)..(9): n is 5-[N-(1-naphthylmethyl)carboxyamide]-2'-deoxyuridine
  misc_feature (11)..(11): n is 5-[N-(1-naphthylmethyl)carboxyamide]-2'-deoxyuridine
  misc_feature (13)..(13): n is 5-[N-(1-naphthylmethyl)carboxyamide]-2'-deoxyuridine
  misc_feature (19)..(19): n is 5-[N-(1-naphthylmethyl)carboxyamide]-2'-deoxyuridine
  misc_feature (21)..(21): n is 5-[N-(1-naphthylmethyl)carboxyamide]-2'-deoxyuridine
cgacancangnangcacancn

SEQ ID NO: 468 - DNA, 21 bp, Artificial Sequence
  Synthetic
  misc_feature (9)..(9): n is 5-[N-(1-naphthylmethyl)carboxyamide]-2'-deoxyuridine
  misc_feature (10)..(10): n is 2'-O-methyl-guanosine
  misc_feature (11)..(11): n is 5-[N-(1-naphthylmethyl)carboxyamide]-2'-deoxyuridine
  misc_feature (13)..(13): n is 5-[N-(1-naphthylmethyl)carboxyamide]-2'-deoxyuridine
  misc_feature (19)..(19): n is 5-[N-(1-naphthylmethyl)carboxyamide]-2'-deoxyuridine
  misc_feature (21)..(21): n is 5-[N-(1-naphthylmethyl)carboxyamide]-2'-deoxyuridine
cgacagcannnangcacancn

SEQ ID NO: 469 - DNA, 21 bp, Artificial Sequence
  Synthetic
  misc_feature (9)..(9): n is 5-[N-(1-naphthylmethyl)carboxyamide]-2'-deoxyuridine
  misc_feature (11)..(11): n is 5-[N-(1-naphthylmethyl)carboxyamide]-2'-deoxyuridine
  misc_feature (13)..(13): n is 5-[N-(1-naphthylmethyl)carboxyamide]-2'-deoxyuridine
  misc_feature (14)..(14): n is 2'-O-methyl-guanosine
  misc_feature (19)..(19): n is 5-[N-(1-naphthylmethyl)carboxyamide]-2'-deoxyuridine
  misc_feature (21)..(21): n is 5-[N-(1-naphthylmethyl)carboxyamide]-2'-deoxyuridine
cgacagcangnanncacancn

SEQ ID NO: 470 - DNA, 21 bp, Artificial Sequence
  Synthetic
  misc_feature (3)..(3): n is 2'-O-methyl-adenosine
  misc_feature (9)..(9): n is 5-[N-(1-naphthylmethyl)carboxyamide]-2'-deoxyuridine
  misc_feature (11)..(11): n is 5-[N-(1-naphthylmethyl)carboxyamide]-2'-deoxyuridine
  misc_feature (13)..(13): n is 5-[N-(1-naphthylmethyl)carboxyamide]-2'-deoxyuridine
  misc_feature (19)..(19): n is 5-[N-(1-naphthylmethyl)carboxyamide]-2'-deoxyuridine
  misc_feature (21)..(21): n is 5-[N-(1-naphthylmethyl)carboxyamide]-2'-deoxyuridine
cgncagcangnangcacancn

SEQ ID NO: 471 - DNA, 21 bp, Artificial Sequence
  Synthetic
  misc_feature (5)..(5): n is 2'-O-methyl-adenosine
  misc_feature (9)..(9): n is 5-[N-(1-naphthylmethyl)carboxyamide]-2'-deoxyuridine
  misc_feature (11)..(11): n is 5-[N-(1-naphthylmethyl)carboxyamide]-2'-deoxyuridine
  misc_feature (13)..(13): n is 5-[N-(1-naphthylmethyl)carboxyamide]-2'-deoxyuridine
  misc_feature (19)..(19): n is 5-[N-(1-naphthylmethyl)carboxyamide]-2'-deoxyuridine
  misc_feature (21)..(21): n is 5-[N-(1-naphthylmethyl)carboxyamide]-2'-deoxyuridine
cgacngcangnangcacancn

SEQ ID NO: 472 - DNA, 21 bp, Artificial Sequence
  Synthetic
  misc_feature (8)..(8): n is 2'-O-methyl-adenosine
  misc_feature (9)..(9): n is 5-[N-(1-naphthylmethyl)carboxyamide]-2'-deoxyuridine
  misc_feature (11)..(11): n is 5-[N-(1-naphthylmethyl)carboxyamide]-2'-deoxyuridine
  misc_feature (13)..(13): n is 5-[N-(1-naphthylmethyl)carboxyamide]-2'-deoxyuridine
  misc_feature (19)..(19): n is 5-[N-(1-naphthylmethyl)carboxyamide]-2'-deoxyuridine
  misc_feature (21)..(21): n is 5-[N-(1-naphthylmethyl)carboxyamide]-2'-deoxyuridine
cgacagcnngnangcacancn

SEQ ID NO: 473 - DNA, 21 bp, Artificial Sequence
  Synthetic
  misc_feature (9)..(9): n is 5-[N-(1-naphthylmethyl)carboxyamide]-2'-deoxyuridine
  misc_feature (11)..(11): n is 5-[N-(1-naphthylmethyl)carboxyamide]-2'-deoxyuridine
  misc_feature (12)..(12): n is 2'-O-methyl-adenosine
  misc_feature (13)..(13): n is 5-[N-(1-naphthylmethyl)carboxyamide]-2'-deoxyuridine
  misc_feature (19)..(19): n is 5-[N-(1-naphthylmethyl)carboxyamide]-2'-deoxyuridine
  misc_feature (21)..(21): n is 5-[N-(1-naphthylmethyl)carboxyamide]-2'-deoxyuridine
cgacagcangnnngcacancn

SEQ ID NO: 474 - DNA, 21 bp, Artificial Sequence
  Synthetic
  misc_feature (9)..(9): n is 5-[N-(1-naphthylmethyl)carboxyamide]-2'-deoxyuridine
  misc_feature (11)..(11): n is 5-[N-(1-naphthylmethyl)carboxyamide]-2'-deoxyuridine
  misc_feature (13)..(13): n is 5-[N-(1-naphthylmethyl)carboxyamide]-2'-deoxyuridine
  misc_feature (16)..(16): n is 2'-O-methyl-adenosine
  misc_feature (19)..(19): n is 5-[N-(1-naphthylmethyl)carboxyamide]-2'-deoxyuridine
  misc_feature (21)..(21): n is 5-[N-(1-naphthylmethyl)carboxyamide]-2'-deoxyuridine
cgacagcangnangcncancn

SEQ ID NO: 475 - DNA, 21 bp, Artificial Sequence
  Synthetic
  misc_feature (9)..(9): n is 5-[N-(1-naphthylmethyl)carboxyamide]-2'-deoxyuridine
  misc_feature (11)..(11): n is 5-[N-(1-naphthylmethyl)carboxyamide]-2'-deoxyuridine
  misc_feature (13)..(13): n is 5-[N-(1-naphthylmethyl)carboxyamide]-2'-deoxyuridine
  misc_feature (18)..(18): n is 2'-O-methyl-adenosine
  misc_feature (19)..(19): n is 5-[N-(1-naphthylmethyl)carboxyamide]-2'-deoxyuridine
  misc_feature (21)..(21): n is 5-[N-(1-naphthylmethyl)carboxyamide]-2'-deoxyuridine
cgacagcangnangcacnncn

SEQ ID NO: 476 - DNA, 21 bp, Artificial Sequence
  Synthetic
  misc_feature (9)..(9): n is 5-[N-(1-naphthylmethyl)carboxyamide]-2'- O-methyl-uridine
  misc_feature (11)..(11): n is 5-[N-(1-naphthylmethyl)carboxyamide]-2'-deoxyuridine
  misc_feature (13)..(13): n is 5-[N-(1-naphthylmethyl)carboxyamide]-2'-deoxyuridine
  misc_feature (19)..(19): n is 5-[N-(1-naphthylmethyl)carboxyamide]-2'-deoxyuridine
  misc_feature (21)..(21): n is 5-[N-(1-naphthylmethyl)carboxyamide]-2'-deoxyuridine
cgacagcangnangcacancn

SEQ ID NO: 477 - DNA, 21 bp, Artificial Sequence
  Synthetic
  misc_feature (9)..(9): n is 5-[N-(1-naphthylmethyl)carboxyamide]-2'-deoxyuridine
  misc_feature (11)..(11): n is 5-[N-(1-naphthylmethyl)carboxyamide]-2'- O-methyl-uridine
  misc_feature (13)..(13): n is 5-[N-(1-naphthylmethyl)carboxyamide]-2'-deoxyuridine
  misc_feature (19)..(19): n is 5-[N-(1-naphthylmethyl)carboxyamide]-2'-deoxyuridine
  misc_feature (21)..(21): n is 5-[N-(1-naphthylmethyl)carboxyamide]-2'-deoxyuridine
cgacagcangnangcacancn

SEQ ID NO: 478 - DNA, 21 bp, Artificial Sequence
  Synthetic
  misc_feature (9)..(9): n is 5-[N-(1-naphthylmethyl)carboxyamide]-2'-deoxyuridine
  misc_feature (11)..(11): n is 5-[N-(1-naphthylmethyl)carboxyamide]-2'-deoxyuridine
  misc_feature (13)..(13): n is 5-[N-(1-naphthylmethyl)carboxyamide]-2'- O-methyl-uridine
  misc_feature (19)..(19): n is 5-[N-(1-naphthylmethyl)carboxyamide]-2'-deoxyuridine
  misc_feature (21)..(21): n is 5-[N-(1-naphthylmethyl)carboxyamide]-2'-deoxyuridine
cgacagcangnangcacancn

SEQ ID NO: 479 - DNA, 21 bp, Artificial Sequence
  Synthetic
  misc_feature (9)..(9): n is 5-[N-(1-naphthylmethyl)carboxyamide]-2'-deoxyuridine
  misc_feature (11)..(11): n is 5-[N-(1-naphthylmethyl)carboxyamide]-2'-deoxyuridine
  misc_feature (13)..(13): n is 5-[N-(1-naphthylmethyl)carboxyamide]-2'-deoxyuridine
  misc_feature (19)..(19): n is 5-[N-(1-naphthylmethyl)carboxyamide]-2'- O-methyl-uridine
  misc_feature (21)..(21): n is 5-[N-(1-naphthylmethyl)carboxyamide]-2'-deoxyuridine
cgacagcangnangcacancn

SEQ ID NO: 480 - DNA, 21 bp, Artificial Sequence
  Synthetic
  misc_feature (9)..(9): n is 5-[N-(1-naphthylmethyl)carboxyamide]-2'-deoxyuridine
  misc_feature (11)..(11): n is 5-[N-(1-naphthylmethyl)carboxyamide]-2'-deoxyuridine
  misc_feature (13)..(13): n is 5-[N-(1-naphthylmethyl)carboxyamide]-2'-deoxyuridine
  misc_feature (19)..(19): n is 5-[N-(1-naphthylmethyl)carboxyamide]-2'-deoxyuridine
  misc_feature (21)..(21): n is 5-[N-(1-naphthylmethyl)carboxyamide]-2'- O-methyl-uridine
cgacagcangnangcacancn

SEQ ID NO: 481 - DNA, 21 bp, Artificial Sequence
  Synthetic
  misc_feature (11)..(11): n is 5-[N-(1-naphthylmethyl)carboxyamide]-2'-deoxyuridine
  misc_feature (13)..(13): n is 5-[N-(1-naphthylmethyl)carboxyamide]-2'-deoxyuridine
  misc_feature (19)..(19): n is 5-[N-(1-naphthylmethyl)carboxyamide]-2'-deoxyuridine
  misc_feature (21)..(21): n is 5-[N-(1-naphthylmethyl)carboxyamide]-2'-deoxyuridine
cgacagcatgnangcacancn

SEQ ID NO: 482 - DNA, 21 bp, Artificial Sequence
  Synthetic
  misc_feature (9)..(9): n is 5-[N-(1-naphthylmethyl)carboxyamide]-2'-deoxyuridine
  misc_feature (13)..(13): n is 5-[N-(1-naphthylmethyl)carboxyamide]-2'-deoxyuridine
  misc_feature (19)..(19): n is 5-[N-(1-naphthylmethyl)carboxyamide]-2'-deoxyuridine
  misc_feature (21)..(21): n is 5-[N-(1-naphthylmethyl)carboxyamide]-2'-deoxyuridine
cgacagcangtangcacancn

SEQ ID NO: 483 - DNA, 21 bp, Artificial Sequence
  Synthetic
  misc_feature (9)..(9): n is 5-[N-(1-naphthylmethyl)carboxyamide]-2'-deoxyuridine
  misc_feature (11)..(11): n is 5-[N-(1-naphthylmethyl)carboxyamide]-2'-deoxyuridine
  misc_feature (19)..(19): n is 5-[N-(1-naphthylmethyl)carboxyamide]-2'-deoxyuridine
  misc_feature (21)..(21): n is 5-[N-(1-naphthylmethyl)carboxyamide]-2'-deoxyuridine
cgacagcangnatgcacancn

SEQ ID NO: 484 - DNA, 21 bp, Artificial Sequence
  Synthetic
  misc_feature (9)..(9): n is 5-[N-(1-naphthylmethyl)carboxyamide]-2'-deoxyuridine
  misc_feature (11)..(11): n is 5-[N-(1-naphthylmethyl)carboxyamide]-2'-deoxyuridine
  misc_feature (13)..(13): n is 5-[N-(1-naphthylmethyl)carboxyamide]-2'-deoxyuridine
  misc_feature (21)..(21): n is 5-[N-(1-naphthylmethyl)carboxyamide]-2'-deoxyuridine
cgacagcangnangcacatcn

SEQ ID NO: 485 - DNA, 21 bp, Artificial Sequence
  Synthetic
  misc_feature (9)..(9): n is 5-[N-(1-naphthylmethyl)carboxyamide]-2'-deoxyuridine
  misc_feature (11)..(11): n is 5-[N-(1-naphthylmethyl)carboxyamide]-2'-deoxyuridine
  misc_feature (13)..(13): n is 5-[N-(1-naphthylmethyl)carboxyamide]-2'-deoxyuridine
  misc_feature (19)..(19): n is 5-[N-(1-naphthylmethyl)carboxyamide]-2'-deoxyuridine
cgacagcangnangcacanct

SEQ ID NO: 486 - DNA, 21 bp, Artificial Sequence
  Synthetic
  misc_feature (7)..(7): n is 2'-O-methyl-cytidine
  misc_feature (9)..(9): n is 5-[N-(1-naphthylmethyl)carboxyamide]-2'-deoxyuridine
  misc_feature (11)..(11): n is 5-[N-(1-naphthylmethyl)carboxyamide]-2'-deoxyuridine
  misc_feature (13)..(13): n is 5-[N-(1-naphthylmethyl)carboxyamide]-2'-deoxyuridine
  misc_feature (16)..(16): n is 2'-O-methyl-adenosine
  misc_feature (18)..(18): n is 2'-O-methyl-adenosine
  misc_feature (19)..(19): n is 5-[N-(1-naphthylmethyl)carboxyamide]-2'-deoxyuridine
  misc_feature (21)..(21): n is 5-[N-(1-naphthylmethyl)carboxyamide]-2'-deoxyuridine
cgacagnangnangcncnncn

SEQ ID NO: 487 - DNA, 21 bp, Artificial Sequence
  Synthetic
  misc_feature (7)..(7): n is 2'-O-methyl-cytidine
  misc_feature (9)..(9): n is 5-[N-(1-naphthylmethyl)carboxyamide]-2'-deoxyuridine
  misc_feature (11)..(11): n is 5-[N-(1-naphthylmethyl)carboxyamide]-2'-deoxyuridine
  misc_feature (13)..(13): n is 5-[N-(1-naphthylmethyl)carboxyamide]-2'-deoxyuridine
  misc_feature (14)..(14): n is 2'-O-methyl-guanosine
  misc_feature (16)..(16): n is 2'-O-methyl-adenosine
  misc_feature (18)..(18): n is 2'-O-methyl-adenosine
  misc_feature (19)..(19): n is 5-[N-(1-naphthylmethyl)carboxyamide]-2'-deoxyuridine
  misc_feature (21)..(21): n is 5-[N-(1-naphthylmethyl)carboxyamide]-2'-deoxyuridine
cgacagnangnanncncnncn

SEQ ID NO: 488 - DNA, 21 bp, Artificial Sequence
  Synthetic
  misc_feature (6)..(6): n is 2'-O-methyl-guanosine
  misc_feature (7)..(7): n is 2'-O-methyl-cytidine
  misc_feature (9)..(9): n is 5-[N-(1-naphthylmethyl)carboxyamide]-2'-deoxyuridine
  misc_feature (11)..(11): n is 5-[N-(1-naphthylmethyl)carboxyamide]-2'-deoxyuridine
  misc_feature (13)..(13): n is 5-[N-(1-naphthylmethyl)carboxyamide]-2'-deoxyuridine
  misc_feature (14)..(14): n is 2'-O-methyl-guanosine
  misc_feature (16)..(16): n is 2'-O-methyl-adenosine
  misc_feature (18)..(18): n is 2'-O-methyl-adenosine
  misc_feature (19)..(19): n is 5-[N-(1-naphthylmethyl)carboxyamide]-2'-deoxyuridine
  misc_feature (20)..(20): n is 2'-O-methyl-cytidine
  misc_feature (21)..(21): n is 5-[N-(1-naphthylmethyl)carboxyamide]-2'- O-methyl-uridine
cgacannangnanncncnnnn

SEQ ID NO: 489 - DNA, 21 bp, Artificial Sequence
  Synthetic
  misc_feature (1)..(1): n is 2'-O-methyl-cytidine
  misc_feature (6)..(6): n is 2'-O-methyl-guanosine
  misc_feature (7)..(7): n is 2'-O-methyl-cytidine
  misc_feature (9)..(9): n is 5-[N-(1-naphthylmethyl)carboxyamide]-2'-deoxyuridine
  misc_feature (11)..(11): n is 5-[N-(1-naphthylmethyl)carboxyamide]-2'-deoxyuridine
  misc_feature (13)..(13): n is 5-[N-(1-naphthylmethyl)carboxyamide]-2'-deoxyuridine
  misc_feature (14)..(14): n is 2'-O-methyl-guanosine
  misc_feature (15)..(15): n is 2'-O-methyl-cytidine
  misc_feature (16)..(16): n is 2'-O-methyl-adenosine
  misc_feature (18)..(18): n is 2'-O-methyl-adenosine
  misc_feature (19)..(19): n is 5-[N-(1-naphthylmethyl)carboxyamide]-2'-deoxyuridine
  misc_feature (20)..(20): n is 2'-O-methyl-cytidine
  misc_feature (21)..(21): n is 5-[N-(1-naphthylmethyl)carboxyamide]-2'- O-methyl-uridine
ngacannangnannnncnnnn

SEQ ID NO: 490 - DNA, 21 bp, Artificial Sequence
  Synthetic
  misc_feature (1)..(1): n is 2'-O-methyl-cytidine
  misc_feature (4)..(4): n is 2'-O-methyl-cytidine
  misc_feature (6)..(6): n is 2'-O-methyl-guanosine
  misc_feature (7)..(7): n is 2'-O-methyl-cytidine
  misc_feature (9)..(9): n is 5-[N-(1-naphthylmethyl)carboxyamide]-2'-deoxyuridine
  misc_feature (11)..(11): n is 5-[N-(1-naphthylmethyl)carboxyamide]-2'-deoxyuridine
  misc_feature (13)..(13): n is 5-[N-(1-naphthylmethyl)carboxyamide]-2'-deoxyuridine
  misc_feature (14)..(14): n is 2'-O-methyl-guanosine
  misc_feature (15)..(15): n is 2'-O-methyl-cytidine
  misc_feature (16)..(16): n is 2'-O-methyl-adenosine
  misc_feature (18)..(18): n is 2'-O-methyl-adenosine
  misc_feature (19)..(19): n is 5-[N-(1-naphthylmethyl)carboxyamide]-2'-deoxyuridine
  misc_feature (20)..(20): n is 2'-O-methyl-cytidine
  misc_feature (21)..(21): n is 5-[N-(1-naphthylmethyl)carboxyamide]-2'- O-methyl-uridine
nganannangnannnncnnnn

SEQ ID NO: 491 - DNA, 21 bp, Artificial Sequence
  Synthetic
  misc_feature (1)..(1): n is 2'-O-methyl-cytidine
  misc_feature (4)..(4): n is 2'-O-methyl-cytidine
  misc_feature (6)..(6): n is 2'-O-methyl-guanosine
  misc_feature (7)..(7): n is 2'-O-methyl-cytidine
  misc_feature (9)..(9): n is 5-[N-(1-naphthylmethyl)carboxyamide]-2'-deoxyuridine
  misc_feature (11)..(11): n is 5-[N-(1-naphthylmethyl)carboxyamide]-2'- O-methyl-uridine
  misc_feature (13)..(13): n is 5-[N-(1-naphthylmethyl)carboxyamide]-2'-deoxyuridine
  misc_feature (14)..(14): n is 2'-O-methyl-guanosine
  misc_feature (15)..(15): n is 2'-O-methyl-cytidine
  misc_feature (16)..(16): n is 2'-O-methyl-adenosine
  misc_feature (17)..(17): n is 2'-O-methyl-cytidine
  misc_feature (18)..(18): n is 2'-O-methyl-adenosine
  misc_feature (19)..(19): n is 5-[N-(1-naphthylmethyl)carboxyamide]-2'-deoxyuridine
  misc_feature (20)..(20): n is 2'-O-methyl-cytidine
  misc_feature (21)..(21): n is 5-[N-(1-naphthylmethyl)carboxyamide]-2'- O-methyl-uridine
nganannangnannnnnnnnn

SEQ ID NO: 492 - DNA, 21 bp, Artificial Sequence
  Synthetic
  misc_feature (1)..(1): n is 2'-O-methyl-cytidine
  misc_feature (2)..(2): n is 2'-O-methyl-guanosine
  misc_feature (4)..(4): n is 2'-O-methyl-cytidine
  misc_feature (6)..(6): n is 2'-O-methyl-guanosine
  misc_feature (7)..(7): n is 2'-O-methyl-cytidine
  misc_feature (9)..(9): n is 5-[N-(1-naphthylmethyl)carboxyamide]-2'-deoxyuridine
  misc_feature (11)..(11): n is 5-[N-(1-naphthylmethyl)carboxyamide]-2'- O-methyl-uridine
  misc_feature (13)..(13): n is 5-[N-(1-naphthylmethyl)carboxyamide]-2'-deoxyuridine
  misc_feature (14)..(14): n is 2'-O-methyl-guanosine
  misc_feature (15)..(15): n is 2'-O-methyl-cytidine
  misc_feature (16)..(16): n is 2'-O-methyl-adenosine
  misc_feature (17)..(17): n is 2'-O-methyl-cytidine
  misc_feature (18)..(18): n is 2'-O-methyl-adenosine
  misc_feature (19)..(19): n is 5-[N-(1-naphthylmethyl)carboxyamide]-2'-deoxyuridine
  misc_feature (20)..(20): n is 2'-O-methyl-cytidine
  misc_feature (21)..(21): n is 5-[N-(1-naphthylmethyl)carboxyamide]-2'- O-methyl-uridine
nnanannangnannnnnnnnn

SEQ ID NO: 493 - DNA, 21 bp, Artificial Sequence
  Synthetic
  misc_feature (1)..(1): n is 2'-O-methyl-cytidine
  misc_feature (2)..(2): n is 2'-O-methyl-guanosine
  misc_feature (4)..(4): n is 2'-O-methyl-cytidine
  misc_feature (6)..(6): n is 2'-O-methyl-guanosine
  misc_feature (7)..(7): n is 2'-O-methyl-cytidine
  misc_feature (9)..(9): n is 5-[N-(1-naphthylmethyl)carboxyamide]-2'-deoxyuridine
  misc_feature (10)..(10): n is 2'-O-methyl-guanosine
  misc_feature (11)..(11): n is 5-[N-(1-naphthylmethyl)carboxyamide]-2'- O-methyl-uridine
  misc_feature (12)..(12): n is 2'-O-methyl-adenosine
  misc_feature (13)..(13): n is 5-[N-(1-naphthylmethyl)carboxyamide]-2'-deoxyuridine
  misc_feature (14)..(14): n is 2'-O-methyl-guanosine
  misc_feature (15)..(15): n is 2'-O-methyl-cytidine
  misc_feature (16)..(16): n is 2'-O-methyl-adenosine
  misc_feature (17)..(17): n is 2'-O-methyl-cytidine
  misc_feature (18)..(18): n is 2'-O-methyl-adenosine
  misc_feature (19)..(19): n is 5-[N-(1-naphthylmethyl)carboxyamide]-2'-deoxyuridine
  misc_feature (20)..(20): n is 2'-O-methyl-cytidine
  misc_feature (21)..(21): n is 5-[N-(1-naphthylmethyl)carboxyamide]-2'- O-methyl-uridine
nnanannannnnnnnnnnnnn

SEQ ID NO: 494 - DNA, 21 bp, Artificial Sequence
  Synthetic
  misc_feature (1)..(1): n is 2'-O-methyl-cytidine
  misc_feature (2)..(2): n is 2'-O-methyl-guanosine
  misc_feature (3)..(3): n is 2'-O-methyl-adenosine
  misc_feature (4)..(4): n is 2'-O-methyl-cytidine
  misc_feature (6)..(6): n is 2'-O-methyl-guanosine
  misc_feature (7)..(7): n is 2'-O-methyl-cytidine
  misc_feature (9)..(9): n is 5-[N-(1-naphthylmethyl)carboxyamide]-2'-deoxyuridine
  misc_feature (10)..(10): n is 2'-O-methyl-guanosine
  misc_feature (11)..(11): n is 5-[N-(1-naphthylmethyl)carboxyamide]-2'- O-methyl-uridine
  misc_feature (12)..(12): n is 2'-O-methyl-adenosine
  misc_feature (13)..(13): n is 5-[N-(1-naphthylmethyl)carboxyamide]-2'-deoxyuridine
  misc_feature (14)..(14): n is 2'-O-methyl-guanosine
  misc_feature (15)..(15): n is 2'-O-methyl-cytidine
  misc_feature (16)..(16): n is 2'-O-methyl-adenosine
  misc_feature (17)..(17): n is 2'-O-methyl-cytidine
  misc_feature (18)..(18): n is 2'-O-methyl-adenosine
  misc_feature (19)..(19): n is 5-[N-(1-naphthylmethyl)carboxyamide]-2'-deoxyuridine
  misc_feature (20)..(20): n is 2'-O-methyl-cytidine
  misc_feature (21)..(21): n is 5-[N-(1-naphthylmethyl)carboxyamide]-2'- O-methyl-uridine
nnnnannannnnnnnnnnnnn

SEQ ID NO: 495 - DNA, 21 bp, Artificial Sequence
  Synthetic
  misc_feature (1)..(1): n is 2'-O-methyl-cytidine
  misc_feature (2)..(2): n is 2'-O-methyl-guanosine
  misc_feature (3)..(3): n is 2'-O-methyl-adenosine
  misc_feature (4)..(4): n is 2'-O-methyl-cytidine
  misc_feature (6)..(6): n is 2'-O-methyl-guanosine
  misc_feature (7)..(7): n is 2'-O-methyl-cytidine
  misc_feature (9)..(9): n is 5-[N-(1-naphthylmethyl)carboxyamide]-2'-deoxyuridine
  misc_feature (10)..(10): n is 2'-O-methyl-guanosine
  misc_feature (11)..(11): n is 5-[N-(1-naphthylmethyl)carboxyamide]-2'- O-methyl-uridine
  misc_feature (12)..(12): n is 2'-O-methyl-adenosine
  misc_feature (13)..(13): n is 5-[N-(1-naphthylmethyl)carboxyamide]-2'- O-methyl-uridine
  misc_feature (14)..(14): n is 2'-O-methyl-guanosine
  misc_feature (15)..(15): n is 2'-O-methyl-cytidine
  misc_feature (16)..(16): n is 2'-O-methyl-adenosine
  misc_feature (17)..(17): n is 2'-O-methyl-cytidine
  misc_feature (18)..(18): n is 2'-O-methyl-adenosine
  misc_feature (19)..(19): n is 5-[N-(1-naphthylmethyl)carboxyamide]-2'- O-methyl-uridine
  misc_feature (20)..(20): n is 2'-O-methyl-cytidine
  misc_feature (21)..(21): n is 5-[N-(1-naphthylmethyl)carboxyamide]-2'- O-methyl-uridine
nnnnannannnnnnnnnnnnn

SEQ ID NO: 496 - DNA, 21 bp, Artificial Sequence
  Synthetic
  misc_feature (1)..(1): n is 2'-O-methyl-cytidine
  misc_feature (2)..(2): n is 2'-O-methyl-guanosine
  misc_feature (3)..(3): n is 2'-O-methyl-adenosine
  misc_feature (4)..(4): n is 2'-O-methyl-cytidine
  misc_feature (5)..(5): n is 2'-O-methyl-adenosine
  misc_feature (6)..(6): n is 2'-O-methyl-guanosine
  misc_feature (7)..(7): n is 2'-O-methyl-cytidine
  misc_feature (9)..(9): n is 5-[N-(1-naphthylmethyl)carboxyamide]-2'- O-methyl-uridine
  misc_feature (10)..(10): n is 2'-O-methyl-guanosine
  misc_feature (11)..(11): n is 5-[N-(1-naphthylmethyl)carboxyamide]-2'- O-methyl-uridine
  misc_feature (12)..(12): n is 2'-O-methyl-adenosine
  misc_feature (13)..(13): n is 5-[N-(1-naphthylmethyl)carboxyamide]-2'- O-methyl-uridine
  misc_feature (14)..(14): n is 2'-O-methyl-guanosine
  misc_feature (15)..(15): n is 2'-O-methyl-cytidine
  misc_feature (16)..(16): n is 2'-O-methyl-adenosine
  misc_feature (17)..(17): n is 2'-O-methyl-cytidine
  misc_feature (18)..(18): n is 2'-O-methyl-adenosine
  misc_feature (19)..(19): n is 5-[N-(1-naphthylmethyl)carboxyamide]-2'- O-methyl-uridine
  misc_feature (20)..(20): n is 2'-O-methyl-cytidine
  misc_feature (21)..(21): n is 5-[N-(1-naphthylmethyl)carboxyamide]-2'- O-methyl-uridine
nnnnnnnannnnnnnnnnnnn

SEQ ID NO: 497 - DNA, 21 bp, Artificial Sequence
  Synthetic
  misc_feature (1)..(1): n is 2'-O-methyl-cytidine
  misc_feature (2)..(2): n is 2'-O-methyl-guanosine
  misc_feature (3)..(3): n is 2'-O-methyl-adenosine
  misc_feature (4)..(4): n is 2'-O-methyl-cytidine
  misc_feature (5)..(5): n is 2'-O-methyl-adenosine
  misc_feature (6)..(6): n is 2'-O-methyl-guanosine
  misc_feature (7)..(7): n is 2'-O-methyl-cytidine
  misc_feature (8)..(8): n is 2'-O-methyl-adenosine
  misc_feature (9)..(9): n is 5-[N-(1-naphthylmethyl)carboxyamide]-2'- O-methyl-uridine
  misc_feature (10)..(10): n is 2'-O-methyl-guanosine
  misc_feature (11)..(11): n is 5-[N-(1-naphthylmethyl)carboxyamide]-2'- O-methyl-uridine
  misc_feature (12)..(12): n is 2'-O-methyl-adenosine
  misc_feature (13)..(13): n is 5-[N-(1-naphthylmethyl)carboxyamide]-2'- O-methyl-uridine
  misc_feature (14)..(14): n is 2'-O-methyl-guanosine
  misc_feature (15)..(15): n is 2'-O-methyl-cytidine
  misc_feature (16)..(16): n is 2'-O-methyl-adenosine
  misc_feature (17)..(17): n is 2'-O-methyl-cytidine
  misc_feature (18)..(18): n is 2'-O-methyl-adenosine
  misc_feature (19)..(19): n is 5-[N-(1-naphthylmethyl)carboxyamide]-2'- O-methyl-uridine
  misc_feature (20)..(20): n is 2'-O-methyl-cytidine
  misc_feature (21)..(21): n is 5-[N-(1-naphthylmethyl)carboxyamide]-2'- O-methyl-uridine
nnnnnnnnnnnnnnnnnnnnn

SEQ ID NO: 498 - DNA, 21 bp, Artificial Sequence
  Synthetic
  misc_feature (1)..(1): n is 2'-O-methyl-cytidine
  misc_feature (7)..(7): n is 2'-O-methyl-cytidine
  misc_feature (9)..(9): n is 5-[N-(1-naphthylmethyl)carboxyamide]-2'-deoxyuridine
  misc_feature (11)..(11): n is 5-[N-(1-naphthylmethyl)carboxyamide]-2'-deoxyuridine
  misc_feature (13)..(13): n is 5-[N-(1-naphthylmethyl)carboxyamide]-2'-deoxyuridine
  misc_feature (15)..(15): n is 2'-O-methyl-cytidine
  misc_feature (16)..(16): n is 2'-O-methyl-adenosine
  misc_feature (18)..(18): n is 2'-O-methyl-adenosine
  misc_feature (19)..(19): n is 5-[N-(1-naphthylmethyl)carboxyamide]-2'-deoxyuridine
  misc_feature (20)..(20): n is 2'-O-methyl-cytidine
  misc_feature (21)..(21): n is 5-[N-(1-naphthylmethyl)carboxyamide]-2'- O-methyl-uridine
ngacagnangnangnncnnnn

SEQ ID NO: 499 - DNA, 21 bp, Artificial Sequence
  Synthetic
  misc_feature (6)..(6): n is 2'-O-methyl-guanosine
  misc_feature (9)..(9): n is 5-[N-(1-naphthylmethyl)carboxyamide]-2'-deoxyuridine
  misc_feature (11)..(11): n is 5-[N-(1-naphthylmethyl)carboxyamide]-2'-deoxyuridine
  misc_feature (13)..(13): n is 5-[N-(1-naphthylmethyl)carboxyamide]-2'-deoxyuridine
  misc_feature (18)..(18): n is 2'-O-methyl-adenosine
  misc_feature (19)..(19): n is 5-[N-(1-naphthylmethyl)carboxyamide]-2'-deoxyuridine
  misc_feature (20)..(20): n is 2'-O-methyl-cytidine
  misc_feature (21)..(21): n is 5-[N-(1-naphthylmethyl)carboxyamide]-2'-deoxyuridine
cgacancangnangcacnnnn

SEQ ID NO: 500 - DNA, 24 bp, Artificial Sequence
  Synthetic
  misc_feature (1)..(1): n is a naturally occurring or modified nucleotide
  misc_feature (2)..(2): n is a modified pyrimidine
  misc_feature (5)..(5): n is Ln, wherein L is a spacer selected from a naturally occurring or modified nucleotide, a hydrocarbon linker, a polyethylene glycol linker or a combination thereof; n is 0 to 20
  misc_feature (6)..(6): n is C or G, and is complementary to the nucleotide at position 4
  misc_feature (7)..(7): n is C, G or a modified pyrimidine, and is complementary to the nucleotide at position 3
  misc_feature (8)..(8): n is a modified pyrimidine
  misc_feature (11)..(11): n is a naturally occurring or modified nucleotide
  misc_feature (12)..(12): n is Nm, wherein N is a naturally occurring or modified nucleotide; m is 0 to 20
  misc_feature (16)..(18): n is a modified pyrimidine
  misc_feature (20)..(20): n is a modified pyrimidine
nnvsnnnnacnngcgnnnanagcg

SEQ ID NO: 501 - DNA, 24 bp, Artificial Sequence
  Synthetic
  misc_feature (1)..(2): n is a modified pyrimidine
  misc_feature (5)..(5): n is Ln, wherein L is a spacer selected from a naturally occurring or modified nucleotide, a hydrocarbon linker, a polyethylene glycol linker or a combination thereof; n is 0 to 20
  misc_feature (6)..(6): n is C or G, and is complementary to the nucleotide at position 4
  misc_feature (7)..(7): n is C, G or a modified pyrimidine, and is complementary to the nucleotide at position 3
  misc_feature (8)..(8): n is a modified pyrimidine
  misc_feature (11)..(11): n is a naturally occurring or modified nucleotide
  misc_feature (12)..(12): n is Nm, wherein N is a naturally occurring or modified nucleotide; m is 0 to 20
  misc_feature (16)..(18): n is a modified pyrimidine
  misc_feature (20)..(20): n is a modified pyrimidine
nnvsnnnnacnngcgnnnanagcg

SEQ ID NO: 502 - DNA, 24 bp, Artificial Sequence
  Synthetic
  misc_feature (1)..(2): n is a modified pyrimidine
  misc_feature (5)..(5): n is Ln, wherein L is a spacer selected from a substituted or unsubstituted C2-C20 linker and a modified or unmodified nucleotide, a naturally occurring or modified nucleotide, a hydrocarbon linker, a polyethylene glycol linker or a combination
  misc_feature (7)..(7): n is C, G or a modified pyrimidine, and is complementary to the nucleotide at position 3
  misc_feature (8)..(8): n is a modified pyrimidine
  misc_feature (11)..(11): n is a naturally occurring or modified nucleotide
  misc_feature (16)..(18): n is a modified pyrimidine
  misc_feature (20)..(20): n is a modified pyrimidine
nnvcngnnacnmgcgnnnanagcg

SEQ ID NO: 503 - DNA, 24 bp, Artificial Sequence
  Synthetic
  misc_feature (1)..(2): n is a modified pyrimidine
  misc_feature (5)..(5): n is Ln, wherein L is a spacer selected from a naturally occurring or modified nucleotide, a hydrocarbon linker, a polyethylene glycol linker or a combination thereof; n is 0 to 20
  misc_feature (7)..(8): n is a modified pyrimidine
  misc_feature (16)..(18): n is a modified pyrimidine
  misc_feature (20)..(20): n is a modified pyrimidine
nnacngnnacacgcgnnnanagcg

SEQ ID NO: 504 - DNA, 29 bp, Artificial Sequence
  Synthetic
  misc_feature (1)..(2): n is a modified pyrimidine
  misc_feature (8)..(8): n is a modified pyrimidine
  misc_feature (12)..(13): n is a modified pyrimidine
  misc_feature (21)..(23): n is a modified pyrimidine
  misc_feature (25)..(25): n is a modified pyrimidine
nnacgacnacgnnacacgcgnnnanagcg

SEQ ID NO: 505 - DNA, 20 bp, Artificial Sequence
  Synthetic
  misc_feature (1)..(1): n is a modified pyrimidine
  misc_feature (3)..(3): n is C, or a substituted or unsubstituted C2-C10 linker
  misc_feature (4)..(4): n is Lp, wherein L is independently selected from a substituted or unsubstituted C2-C10 linker, a polyethylene glycol linker, and a modified or unmodified nucleotide; p is 1 to 10
  misc_feature (6)..(6): n is a modified or unmodified pyrimidine
  misc_feature (7)..(7): n is a modified pyrimidine
  misc_feature (9)..(9): n is C, or a substituted or unsubstituted C2-C10 linker
  misc_feature (10)..(10): n is Kq, wherein K is independently selected from a substituted or unsubstituted C2-C10 linker, a polyethylene glycol linker, and a modified or unmodified nucleotide; q is 1 to 5
  misc_feature (14)..(15): n is a modified pyrimidine
  misc_feature (16)..(16): n is a modified or unmodified pyrimidine
  misc_feature (17)..(17): n is A, or a substituted or unsubstituted C2-C10 linker
  misc_feature (18)..(18): n is a modified or unmodified pyrimidine
nanngnnanngcgnnnnnag

SEQ ID NO: 506 - DNA, 23 bp, Artificial Sequence
  Synthetic
  misc_feature (1)..(1): n is a modified or unmodified pyrimidine, a substituted or unsubstituted C2-C10 linker, or is absent
  misc_feature (2)..(2): n is a modified pyrimidine
  misc_feature (4)..(4): n is C, or a substituted or unsubstituted C2-C10 linker
  misc_feature (5)..(5): n is Lp, wherein L is independently selected from a substituted or unsubstituted C2-C10 linker, a polyethylene glycol linker, and a modified or unmodified nucleotide; p is 1 to 10
  misc_feature (7)..(7): n is a modified or unmodified pyrimidine
  misc_feature (8)..(8): n is a modified pyrimidine
  misc_feature (10)..(10): n is C, or a substituted or unsubstituted C2-C10 linker
  misc_feature (11)..(11): n is Kq, wherein K is independently selected from a substituted or unsubstituted C2-C10 linker, a polyethylene glycol linker, and a modified or unmodified nucleotide; q is 1 to 5
  misc_feature (15)..(16): n is a modified pyrimidine
  misc_feature (17)..(17): n is a modified or unmodified pyrimidine
  misc_feature (18)..(18): n is A, or a substituted or unsubstituted C2-C10 linker
  misc_feature (19)..(19): n is a modified or unmodified pyrimidine
  misc_feature (22)..(22): n is C, or a substituted or unsubstituted C2-C10 linker
  misc_feature (23)..(23): n is G, a substituted or unsubstituted C2-C10 linker, or is absent
nnanngnnanngcgnnnnnagnn

SEQ ID NO: 507 - DNA, 21 bp, Artificial Sequence
  Synthetic
  misc_feature (1)..(1): n is a modified pyrimidine
  misc_feature (4)..(4): n is Ln, wherein L is selected from a substituted or unsubstituted C2-C20 linker and a modified or unmodified nucleotide; n is 1 to 50
  misc_feature (5)..(5): n is a C or G, is complementary to the nucleotide at position 3
  misc_feature (6)..(6): n is a C, G or a modified pyrimidine, and is complementary to the nucleotide at position 2
  misc_feature (7)..(7): n is a modified pyrimidine
  misc_feature (10)..(10): n is a modified or unmodified nucleotide
  misc_feature (11)..(11): n is Nm, N is a modified or unmodified nucleotide; m is 0 to 50
  misc_feature (15)..(17): n is a modified pyrimidine
  misc_feature (19)..(19): n is a modified pyrimidine
nvsnnnnacnngcgnnnanag

SEQ ID NO: 508 - DNA, 23 bp, Artificial Sequence
  Synthetic
  misc_feature (1)..(1): n is a modified pyrimidine or dT
  misc_feature (2)..(2): n is a modified pyrimidine
  misc_feature (5)..(5): n is Ln, wherein L is selected from a substituted or unsubstituted C2-C20 linker and a modified or unmodified nucleotide; n is 1 to 50
  misc_feature (6)..(6): n is a C or G, is complementary to the nucleotide at position 4
  misc_feature (7)..(7): n is a C, G or Z, and is complementary to the nucleotide at position 3
  misc_feature (8)..(8): n is a modified pyrimidine
  misc_feature (11)..(11): n is a modified or unmodified nucleotide
  misc_feature (12)..(12): n is Nm, N is a modified or unmodified nucleotide; m is 0 to 50
  misc_feature (16)..(18): n is a modified pyrimidine
  misc_feature (20)..(20): n is a modified pyrimidine
nnvsnnnnacnngcgnnnanagc

SEQ ID NO: 509 - DNA, 23 bp, Artificial Sequence
  Synthetic
  misc_feature (1)..(1): n is a modified pyrimidine or dT
  misc_feature (2)..(2): n is a modified pyrimidine
  misc_feature (5)..(5): n is Ln, wherein L is selected from a substituted or unsubstituted C2-C20 linker and a modified or unmodified nucleotide; n is 1 to 50
  misc_feature (7)..(7): n is C, G or Z, and is complementary to the nucleotide at position 3
  misc_feature (8)..(8): n is a modified pyrimidine
  misc_feature (11)..(11): n is a modified or unmodified nucleotide
  misc_feature (16)..(18): n is a modified pyrimidine
  misc_feature (20)..(20): n is a modified pyrimidine
nnvcngnnacnmgcgnnnanagc

SEQ ID NO: 510 - DNA, 23 bp, Artificial Sequence
  Synthetic
  misc_feature (1)..(1): n is a modified pyrimidine or dT
  misc_feature (2)..(2): n is a modified pyrimidine
  misc_feature (5)..(5): n is Ln, wherein L is selected from a substituted or unsubstituted C2-C20 linker and a modified or unmodified nucleotide; n is 1 to 50
  misc_feature (7)..(8): n is a modified pyrimidine
  misc_feature (16)..(18): n is a modified pyrimidine
  misc_feature (20)..(20): n is a modified pyrimidine
nnacngnnacacgcgnnnanagc

SEQ ID NO: 511 - DNA, 28 bp, Artificial Sequence
  Synthetic
  misc_feature (1)..(1): n is a modified pyrimidine or dT
  misc_feature (2)..(2): n is a modified pyrimidine
  misc_feature (8)..(8): n is a modified pyrimidine
  misc_feature (12)..(13): n is a modified pyrimidine
  misc_feature (21)..(23): n is a modified pyrimidine
  misc_feature (25)..(25): n is a modified pyrimidine
nnacgacnacgnnacacgcgnnnanagc

SEQ ID NO: 512 - DNA, 14 bp, Artificial Sequence
  Synthetic
  misc_feature (4)..(4): n is Ln, wherein L is a substituted or unsubstituted C2-C50 linker, a polyethylene glycol linker, or a modified or unmodified nucleotide; n is 1 to 5
  misc_feature (5)..(5): n is a modified pyrimidine
  misc_feature (7)..(7): n is a modified pyrimidine
  misc_feature (9)..(9): n is a modified pyrimidine
  misc_feature (11)..(11): n is Lm, wherein L is a substituted or unsubstituted C2-C50 linker, a polyethylene glycol linker, or a modified or unmodified nucleotide; m is 1 to 10
  misc_feature (12)..(12): n is a modified pyrimidine
  misc_feature (13)..(13): n is a substituted or unsubstituted C2-C50 linker, a polyethylene glycol linker, or a modified or unmodified nucleotide
  misc_feature (14)..(14): n is a modified pyrimidine
acanngnangnnnn

SEQ ID NO: 513 - DNA, 27 bp, Artificial Sequence
  Synthetic
  misc_feature (2)..(3): n is a modified pyrimidine
  misc_feature (4)..(4): n is a modified or unmodified nucleotide, a substituted or unsubstituted C2-C50 linker, or is absent
  misc_feature (7)..(7): n is G, or a substituted or unsubstituted C2-C50 linker
  misc_feature (8)..(8): n is a modified pyrimidine
  misc_feature (9)..(9): n is G, or a substituted or unsubstituted C2-C50 linker
  misc_feature (11)..(12): n is a modified pyrimidine
  misc_feature (13)..(13): n is G, or a substituted or unsubstituted C2-C50 linker
  misc_feature (14)..(14): n is a modified pyrimidine
  misc_feature (15)..(15): n is A, or a substituted or unsubstituted C2-C50 linker
  misc_feature (16)..(16): n is a modified or unmodified nucleotide, a substituted or unsubstituted C2-C50 linker
  misc_feature (19)..(21): n is a modified pyrimidine
  misc_feature (25)..(25): n is a modified pyrimidine
gnnnaannncnnnnnngannnaaangg

SEQ ID NO: 514 - DNA, 27 bp, Artificial Sequence
  Synthetic
  misc_feature (3)..(4): n is a modified pyrimidine
  misc_feature (5)..(5): n is a modified or unmodified nucleotide, a substituted or unsubstituted C2-C50 linker, or is absent
  misc_feature (8)..(8): n is G, or a substituted or unsubstituted C2-C50 linker
  misc_feature (9)..(9): n is a modified pyrimidine
  misc_feature (10)..(10): n is G, or a substituted or unsubstituted C2-C50 linker
  misc_feature (12)..(13): n is a modified pyrimidine
  misc_feature (14)..(14): n is G, or a substituted or unsubstituted C2-C50 linker
  misc_feature (15)..(15): n is a modified pyrimidine
  misc_feature (16)..(16): n is A, or a substituted or unsubstituted C2-C50 linker
  misc_feature (17)..(17): n is a modified or unmodified nucleotide, a substituted or unsubstituted C2-C50 linker
  misc_feature (20)..(22): n is a modified pyrimidine
  misc_feature (26)..(26): n is a modified pyrimidine
cgnnnaannncnnnnnngannnaaang

SEQ ID NO: 515 - DNA, 28 bp, Artificial Sequence
  Synthetic
  misc_feature (3)..(4): n is a modified pyrimidine
  misc_feature (5)..(5): n is a modified or unmodified nucleotide, a substituted or unsubstituted C2-C50 linker, or is absent
  misc_feature (8)..(8): n is G, or a substituted or unsubstituted C2-C50 linker
  misc_feature (9)..(9): n is a modified pyrimidine
  misc_feature (10)..(10): n is G, or a substituted or unsubstituted C2-C50 linker
  misc_feature (12)..(13): n is a modified pyrimidine
  misc_feature (14)..(14): n is G, or a substituted or unsubstituted C2-C50 linker
  misc_feature (15)..(15): n is a modified pyrimidine
  misc_feature (16)..(16): n is A, or a substituted or unsubstituted C2-C50 linker
  misc_feature (17)..(17): n is a modified or unmodified nucleotide, a substituted or unsubstituted C2-C50 linker
  misc_feature (20)..(22): n is a modified pyrimidine
  misc_feature (26)..(26): n is a modified pyrimidine
cgnnnaannncnnnnnngannnaaangg

SEQ ID NO: 516 - DNA, 29 bp, Artificial Sequence
  Synthetic
  misc_feature (4)..(5): n is a modified pyrimidine
  misc_feature (6)..(6): n is a modified or unmodified nucleotide, a substituted or unsubstituted C2-C50 linker, or is absent
  misc_feature (9)..(9): n is G, or a substituted or unsubstituted C2-C50 linker
  misc_feature (10)..(10): n is a modified pyrimidine
  misc_feature (11)..(11): n is G, or a substituted or unsubstituted C2-C50 linker
  misc_feature (13)..(14): n is a modified pyrimidine
  misc_feature (15)..(15): n is G, or a substituted or unsubstituted C2-C50 linker
  misc_feature (16)..(16): n is a modified pyrimidine
  misc_feature (17)..(17): n is A, or a substituted or unsubstituted C2-C50 linker
  misc_feature (18)..(18): n is a modified or unmodified nucleotide, a substituted or unsubstituted C2-C50 linker
  misc_feature (21)..(23): n is a modified pyrimidine
  misc_feature (27)..(27): n is a modified pyrimidine
ccgnnnaannncnnnnnngannnaaangg

SEQ ID NO: 517 - DNA, 21 bp, Artificial Sequence
  Synthetic
  misc_feature (1)..(1): n is 2'-O-methyl-cytidine
  misc_feature (9)..(9): n is 5-[N-(1-naphthylmethyl)carboxyamide]-2'-deoxyuridine
  misc_feature (11)..(11): n is 5-[N-(1-naphthylmethyl)carboxyamide]-2'-deoxyuridine
  misc_feature (13)..(13): n is 5-[N-(1-naphthylmethyl)carboxyamide]-2'-deoxyuridine
  misc_feature (18)..(18): n is 2'-O-methyl-adenosine
  misc_feature (19)..(19): n is 5-[N-(1-naphthylmethyl)carboxyamide]-2'-deoxyuridine
  misc_feature (20)..(20): n is 2'-O-methyl-cytidine
  misc_feature (21)..(21): n is 5-[N-(1-naphthylmethyl)carboxyamide]-2'-deoxyuridine
ngacagcangnangcacnnnn

SEQ ID NO: 518 - DNA, 21 bp, Artificial Sequence
  Synthetic
  misc_feature (1)..(1): n is 2'-O-methyl-cytidine
  misc_feature (6)..(6): n is 2'-O-methyl-guanosine
  misc_feature (9)..(9): n is 5-[N-(1-naphthylmethyl)carboxyamide]-2'-deoxyuridine
  misc_feature (11)..(11): n is 5-[N-(1-naphthylmethyl)carboxyamide]-2'-deoxyuridine
  misc_feature (13)..(13): n is 5-[N-(1-naphthylmethyl)carboxyamide]-2'-deoxyuridine
  misc_feature (18)..(18): n is 2'-O-methyl-adenosine
  misc_feature (19)..(19): n is 5-[N-(1-naphthylmethyl)carboxyamide]-2'-deoxyuridine
  misc_feature (21)..(21): n is 5-[N-(1-naphthylmethyl)carboxyamide]-2'-deoxyuridine
ngacancangnangcacnncn

SEQ ID NO: 519 - DNA, 21 bp, Artificial Sequence
  Synthetic
  misc_feature (1)..(1): n is 2'-O-methyl-cytidine
  misc_feature (6)..(6): n is 2'-O-methyl-guanosine
  misc_feature (9)..(9): n is 5-[N-(1-naphthylmethyl)carboxyamide]-2'-deoxyuridine
  misc_feature (11)..(11): n is 5-[N-(1-naphthylmethyl)carboxyamide]-2'-deoxyuridine
  misc_feature (13)..(13): n is 5-[N-(1-naphthylmethyl)carboxyamide]-2'-deoxyuridine
  misc_feature (14)..(14): n is 2'-O-methyl-guanosine
  misc_feature (19)..(19): n is 5-[N-(1-naphthylmethyl)carboxyamide]-2'-deoxyuridine
  misc_feature (21)..(21): n is 5-[N-(1-naphthylmethyl)carboxyamide]-2'-deoxyuridine
ngacancangnanncacancn

SEQ ID NO: 520 - DNA, 21 bp, Artificial Sequence
  Synthetic
  misc_feature (1)..(1): n is 2'-O-methyl-cytidine
  misc_feature (6)..(6): n is 2'-O-methyl-guanosine
  misc_feature (9)..(9): n is 5-[N-(1-naphthylmethyl)carboxyamide]-2'-deoxyuridine
  misc_feature (11)..(11): n is 5-[N-(1-naphthylmethyl)carboxyamide]-2'-deoxyuridine
  misc_feature (13)..(13): n is 5-[N-(1-naphthylmethyl)carboxyamide]-2'-deoxyuridine
  misc_feature (16)..(16): n is 2'-O-methyl-adenosine
  misc_feature (19)..(19): n is 5-[N-(1-naphthylmethyl)carboxyamide]-2'-deoxyuridine
  misc_feature (21)..(21): n is 5-[N-(1-naphthylmethyl)carboxyamide]-2'-deoxyuridine
ngacancangnangcncancn

SEQ ID NO: 521 - DNA, 21 bp, Artificial Sequence
  Synthetic
  misc_feature (1)..(1): n is 2'-O-methyl-cytidine
  misc_feature (9)..(9): n is 5-[N-(1-naphthylmethyl)carboxyamide]-2'-deoxyuridine
  misc_feature (11)..(11): n is 5-[N-(1-naphthylmethyl)carboxyamide]-2'-deoxyuridine
  misc_feature (13)..(13): n is 5-[N-(1-naphthylmethyl)carboxyamide]-2'-deoxyuridine
  misc_feature (14)..(14): n is 2'-O-methyl-guanosine
  misc_feature (16)..(16): n is 2'-O-methyl-adenosine
  misc_feature (19)..(19): n is 5-[N-(1-naphthylmethyl)carboxyamide]-2'-deoxyuridine
  misc_feature (21)..(21): n is 5-[N-(1-naphthylmethyl)carboxyamide]-2'-deoxyuridine
ngacagcangnanncncancn

SEQ ID NO: 522 - DNA, 21 bp, Artificial Sequence
  Synthetic
  misc_feature (7)..(7): n is 2'-O-methyl-cytidine
  misc_feature (9)..(9): n is 5-[N-(1-naphthylmethyl)carboxyamide]-2'-deoxyuridine
  misc_feature (11)..(11): n is 5-[N-(1-naphthylmethyl)carboxyamide]-2'-deoxyuridine
  misc_feature (13)..(13): n is 5-[N-(1-naphthylmethyl)carboxyamide]-2'-deoxyuridine
  misc_feature (14)..(14): n is 2'-O-methyl-guanosine
  misc_feature (16)..(16): n is 2'-O-methyl-adenosine
  misc_feature (19)..(19): n is 5-[N-(1-naphthylmethyl)carboxyamide]-2'-deoxyuridine
  misc_feature (21)..(21): n is 5-[N-(1-naphthylmethyl)carboxyamide]-2'-deoxyuridine
cgacagnangnanncncancn

SEQ ID NO: 523 - DNA, 21 bp, Artificial Sequence
  Synthetic
  misc_feature (9)..(9): n is 5-[N-(1-naphthylmethyl)carboxyamide]-2'-deoxyuridine
  misc_feature (11)..(11): n is 5-[N-(1-naphthylmethyl)carboxyamide]-2'-deoxyuridine
  misc_feature (13)..(13): n is 5-[N-(1-naphthylmethyl)carboxyamide]-2'-deoxyuridine
  misc_feature (14)..(14): n is 2'-O-methyl-guanosine
  misc_feature (16)..(16): n is 2'-O-methyl-adenosine
  misc_feature (19)..(19): n is 5-[N-(1-naphthylmethyl)carboxyamide]-2'-deoxyuridine
  misc_feature (21)..(21): n is 5-[N-(1-naphthylmethyl)carboxyamide]-2'- O-methyl-uridine
cgacagcangnanncncancn

SEQ ID NO: 524 - DNA, 21 bp, Artificial Sequence
  Synthetic
  misc_feature (7)..(7): n is 2'-O-methyl-cytidine
  misc_feature (9)..(9): n is 5-[N-(1-naphthylmethyl)carboxyamide]-2'-deoxyuridine
  misc_feature (11)..(11): n is 5-[N-(1-naphthylmethyl)carboxyamide]-2'-deoxyuridine
  misc_feature (13)..(13): n is 5-[N-(1-naphthylmethyl)carboxyamide]-2'-deoxyuridine
  misc_feature (16)..(16): n is 2'-O-methyl-adenosine
  misc_feature (19)..(19): n is 5-[N-(1-naphthylmethyl)carboxyamide]-2'-deoxyuridine
  misc_feature (21)..(21): n is 5-[N-(1-naphthylmethyl)carboxyamide]-2'- O-methyl-uridine
cgacagnangnangcncancn

SEQ ID NO: 525 - DNA, 21 bp, Artificial Sequence
  Synthetic
  misc_feature (7)..(7): n is 2'-O-methyl-cytidine
  misc_feature (9)..(9): n is 5-[N-(1-naphthylmethyl)carboxyamide]-2'-deoxyuridine
  misc_feature (11)..(11): n is 5-[N-(1-naphthylmethyl)carboxyamide]-2'-deoxyuridine
  misc_feature (13)..(13): n is 5-[N-(1-naphthylmethyl)carboxyamide]-2'-deoxyuridine
  misc_feature (17)..(17): n is 2'-O-methyl-cytidine
  misc_feature (19)..(19): n is 5-[N-(1-naphthylmethyl)carboxyamide]-2'-deoxyuridine
  misc_feature (21)..(21): n is 5-[N-(1-naphthylmethyl)carboxyamide]-2'- O-methyl-uridine
cgacagnangnangcanancn

SEQ ID NO: 526 - DNA, 21 bp, Artificial Sequence
  Synthetic
  misc_feature (4)..(4): n is 2'-O-methyl-cytidine
  misc_feature (7)..(7): n is 2'-O-methyl-cytidine
  misc_feature (9)..(9): n is 5-[N-(1-naphthylmethyl)carboxyamide]-2'-deoxyuridine
  misc_feature (11)..(11): n is 5-[N-(1-naphthylmethyl)carboxyamide]-2'-deoxyuridine
  misc_feature (13)..(13): n is 5-[N-(1-naphthylmethyl)carboxyamide]-2'-deoxyuridine
  misc_feature (19)..(19): n is 5-[N-(1-naphthylmethyl)carboxyamide]-2'-deoxyuridine
  misc_feature (21)..(21): n is 5-[N-(1-naphthylmethyl)carboxyamide]-2'- O-methyl-uridine
cganagnangnangcacancn

SEQ ID NO: 527 - DNA, 21 bp, Artificial Sequence
  Synthetic
  misc_feature (4)..(4): n is 2'-O-methyl-cytidine
  misc_feature (9)..(9): n is 5-[N-(1-naphthylmethyl)carboxyamide]-2'-deoxyuridine
  misc_feature (11)..(11): n is 5-[N-(1-naphthylmethyl)carboxyamide]-2'-deoxyuridine
  misc_feature (13)..(13): n is 5-[N-(1-naphthylmethyl)carboxyamide]-2'-deoxyuridine
  misc_feature (17)..(17): n is 2'-O-methyl-cytidine
  misc_feature (19)..(19): n is 5-[N-(1-naphthylmethyl)carboxyamide]-2'-deoxyuridine
  misc_feature (21)..(21): n is 5-[N-(1-naphthylmethyl)carboxyamide]-2'-deoxyuridine
cganagcangnangcanancn

SEQ ID NO: 528 - DNA, 21 bp, Artificial Sequence
  Synthetic
  misc_feature (4)..(4): n is 2'-O-methyl-cytidine
  misc_feature (9)..(9): n is 5-[N-(1-naphthylmethyl)carboxyamide]-2'-deoxyuridine
  misc_feature (11)..(11): n is 5-[N-(1-naphthylmethyl)carboxyamide]-2'-deoxyuridine
  misc_feature (12)..(12): n is 2'-O-methyl-adenosine
  misc_feature (13)..(13): n is 5-[N-(1-naphthylmethyl)carboxyamide]-2'-deoxyuridine
  misc_feature (17)..(17): n is 2'-O-methyl-cytidine
  misc_feature (19)..(19): n is 5-[N-(1-naphthylmethyl)carboxyamide]-2'-deoxyuridine
  misc_feature (21)..(21): n is 5-[N-(1-naphthylmethyl)carboxyamide]-2'-deoxyuridine
cganagcangnnngcanancn

SEQ ID NO: 529 - DNA, 21 bp, Artificial Sequence
  Synthetic
  misc_feature (2)..(2): n is 2'-O-methyl-guanosine
  misc_feature (4)..(4): n is 2'-O-methyl-cytidine
  misc_feature (9)..(9): n is 5-[N-(1-naphthylmethyl)carboxyamide]-2'-deoxyuridine
  misc_feature (11)..(11): n is 5-[N-(1-naphthylmethyl)carboxyamide]-2'-deoxyuridine
  misc_feature (13)..(13): n is 5-[N-(1-naphthylmethyl)carboxyamide]-2'-deoxyuridine
  misc_feature (17)..(17): n is 2'-O-methyl-cytidine
  misc_feature (19)..(19): n is 5-[N-(1-naphthylmethyl)carboxyamide]-2'-deoxyuridine
  misc_feature (21)..(21): n is 5-[N-(1-naphthylmethyl)carboxyamide]-2'-deoxyuridine
cnanagcangnangcanancn

SEQ ID NO: 530 - DNA, 21 bp, Artificial Sequence
  Synthetic
  misc_feature (2)..(2): n is 2'-O-methyl-guanosine
  misc_feature (4)..(4): n is 2'-O-methyl-cytidine
  misc_feature (9)..(9): n is 5-[N-(1-naphthylmethyl)carboxyamide]-2'-deoxyuridine
  misc_feature (11)..(11): n is 5-[N-(1-naphthylmethyl)carboxyamide]-2'-deoxyuridine
  misc_feature (13)..(13): n is 5-[N-(1-naphthylmethyl)carboxyamide]-2'-deoxyuridine
  misc_feature (17)..(17): n is 2'-O-methyl-cytidine
  misc_feature (19)..(19): n is 5-[N-(1-naphthylmethyl)carboxyamide]-2'-deoxyuridine
  misc_feature (21)..(21): n is 5-[N-(1-naphthylmethyl)carboxyamide]-2'-deoxyuridine
cnanagcangnangcanancn

SEQ ID NO: 531 - DNA, 21 bp, Artificial Sequence
  Synthetic
  misc_feature (2)..(2): n is 2'-O-methyl-guanosine
  misc_feature (9)..(9): n is 5-[N-(1-naphthylmethyl)carboxyamide]-2'-deoxyuridine
  misc_feature (11)..(11): n is 5-[N-(1-naphthylmethyl)carboxyamide]-2'-deoxyuridine
  misc_feature (12)..(12): n is 2'-O-methyl-adenosine
  misc_feature (13)..(13): n is 5-[N-(1-naphthylmethyl)carboxyamide]-2'-deoxyuridine
  misc_feature (15)..(15): 2'-O-methyl-cytidine
  misc_feature (19)..(19): n is 5-[N-(1-naphthylmethyl)carboxyamide]-2'-deoxyuridine
  misc_feature (21)..(21): n is 5-[N-(1-naphthylmethyl)carboxyamide]-2'-deoxyuridine
cnacagcangnnngnacancn

SEQ ID NO: 532 - DNA, 21 bp, Artificial Sequence
  Synthetic
  misc_feature (2)..(2): n is 2'-O-methyl-guanosine
  misc_feature (9)..(9): n is 5-[N-(1-naphthylmethyl)carboxyamide]-2'-deoxyuridine
  misc_feature (10)..(10): n is 2'-O-methyl-guanosine
  misc_feature (11)..(11): n is 5-[N-(1-naphthylmethyl)carboxyamide]-2'-deoxyuridine
  misc_feature (12)..(12): n is 2'-O-methyl-adenosine
  misc_feature (13)..(13): n is 5-[N-(1-naphthylmethyl)carboxyamide]-2'-deoxyuridine
  misc_feature (19)..(19): n is 5-[N-(1-naphthylmethyl)carboxyamide]-2'-deoxyuridine
  misc_feature (21)..(21): n is 5-[N-(1-naphthylmethyl)carboxyamide]-2'-deoxyuridine
cnacagcannnnngcacancn

SEQ ID NO: 533 - DNA, 21 bp, Artificial Sequence
  Synthetic
  misc_feature (2)..(2): n is 2'-O-methyl-guanosine
  misc_feature (9)..(9): n is 5-[N-(1-naphthylmethyl)carboxyamide]-2'-deoxyuridine
  misc_feature (10)..(10): n is 2'-O-methyl-guanosine
  misc_feature (11)..(11): n is 5-[N-(1-naphthylmethyl)carboxyamide]-2'-deoxyuridine
  misc_feature (13)..(13): n is 5-[N-(1-naphthylmethyl)carboxyamide]-2'-deoxyuridine
  misc_feature (15)..(15): n is 2'-O-methyl-cytidine
  misc_feature (19)..(19): n is 5-[N-(1-naphthylmethyl)carboxyamide]-2'-deoxyuridine
  misc_feature (21)..(21): n is 5-[N-(1-naphthylmethyl)carboxyamide]-2'-deoxyuridine
cnacagcannnangnacancn

SEQ ID NO: 534 - DNA, 21 bp, Artificial Sequence
  Synthetic
  misc_feature (1)..(1): n is 2'-O-methyl-cytidine
  misc_feature (9)..(9): n is 5-[N-(1-naphthylmethyl)carboxyamide]-2'-deoxyuridine
  misc_feature (11)..(11): n is 5-[N-(1-naphthylmethyl)carboxyamide]-2'-deoxyuridine
  misc_feature (13)..(13): n is 5-[N-(1-naphthylmethyl)carboxyamide]-2'-deoxyuridine
  misc_feature (19)..(19): n is 5-[N-(1-naphthylmethyl)carboxyamide]-2'-deoxyuridine
  misc_feature (20)..(20): n is 2'-O-methyl-cytidine
  misc_feature (21)..(21): n is 5-[N-(1-naphthylmethyl)carboxyamide]-2'- O-methyl-uridine
ngacagcangnangcacannn

SEQ ID NO: 535 - DNA, 21 bp, Artificial Sequence
  Synthetic
  misc_feature (5)..(5): n is 2'-O-methyl-adenosine
  misc_feature (9)..(9): n is 5-[N-(1-naphthylmethyl)carboxyamide]-2'-deoxyuridine
  misc_feature (11)..(11): n is 5-[N-(1-naphthylmethyl)carboxyamide]-2'-deoxyuridine
  misc_feature (13)..(13): n is 5-[N-(1-naphthylmethyl)carboxyamide]-2'-deoxyuridine
  misc_feature (19)..(19): n is 5-[N-(1-naphthylmethyl)carboxyamide]-2'-deoxyuridine
  misc_feature (20)..(20): n is 2'-O-methyl-cytidine
  misc_feature (21)..(21): n is 5-[N-(1-naphthylmethyl)carboxyamide]-2'- O-methyl-uridine
cgacngcangnangcacannn

SEQ ID NO: 536 - DNA, 21 bp, Artificial Sequence
  Synthetic
  misc_feature (1)..(1): n is 2'-O-methyl-cytidine
  misc_feature (5)..(5): n is 2'-O-methyl-adenosine
  misc_feature (9)..(9): n is 5-[N-(1-naphthylmethyl)carboxyamide]-2'-deoxyuridine
  misc_feature (11)..(11): n is 5-[N-(1-naphthylmethyl)carboxyamide]-2'-deoxyuridine
  misc_feature (13)..(13): n is 5-[N-(1-naphthylmethyl)carboxyamide]-2'-deoxyuridine
  misc_feature (19)..(19): n is 5-[N-(1-naphthylmethyl)carboxyamide]-2'-deoxyuridine
  misc_feature (20)..(20): n is 2'-O-methyl-cytidine
  misc_feature (21)..(21): n is 5-[N-(1-naphthylmethyl)carboxyamide]-2'-deoxyuridine
ngacngcangnangcacannn

SEQ ID NO: 537 - DNA, 21 bp, Artificial Sequence
  Synthetic
  misc_feature (9)..(9): n is 5-[N-(1-naphthylmethyl)carboxyamide]-2'-deoxyuridine
  misc_feature (11)..(11): n is 5-[N-(1-naphthylmethyl)carboxyamide]-2'-deoxyuridine
  misc_feature (13)..(13): n is 5-[N-(1-naphthylmethyl)carboxyamide]-2'-deoxyuridine
  misc_feature (19)..(19): n is 5-[N-(1-naphthylmethyl)carboxyamide]-2'- O-methyl-uridine
  misc_feature (20)..(20): n is 2'-O-methyl-cytidine
  misc_feature (21)..(21): n is 5-[N-(1-naphthylmethyl)carboxyamide]-2'- O-methyl-uridine
cgacagcangnangcacannn

SEQ ID NO: 538 - DNA, 21 bp, Artificial Sequence
  Synthetic
  misc_feature (9)..(9): n is 5-[N-(1-naphthylmethyl)carboxyamide]-2'-deoxyuridine
  misc_feature (11)..(11): n is 5-[N-(1-naphthylmethyl)carboxyamide]-2'-deoxyuridine
  misc_feature (13)..(13): n is 5-[N-(1-naphthylmethyl)carboxyamide]-2'-deoxyuridine
  misc_feature (16)..(16): n is 2'-O-methyl-adenosine
  misc_feature (17)..(17): n is 2'-O-methyl-cytidine
  misc_feature (18)..(18): n is 2'-O-methyl-adenosine
  misc_feature (19)..(19): n is 5-[N-(1-naphthylmethyl)carboxyamide]-2'-deoxyuridine
  misc_feature (21)..(21): n is 5-[N-(1-naphthylmethyl)carboxyamide]-2'-deoxyuridine
cgacagcangnangcnnnncn

SEQ ID NO: 539 - DNA, 21 bp, Artificial Sequence
  Synthetic
  misc_feature (9)..(9): n is 5-[N-(1-naphthylmethyl)carboxyamide]-2'-deoxyuridine
  misc_feature (11)..(11): n is 5-[N-(1-naphthylmethyl)carboxyamide]-2'-deoxyuridine
  misc_feature (13)..(13): n is 5-[N-(1-naphthylmethyl)carboxyamide]-2'- O-methyl-uridine
  misc_feature (14)..(14): n is 2'-O-methyl-guanosine
  misc_feature (15)..(15): n is 2'-O-methyl-cytidine
  misc_feature (19)..(19): n is 5-[N-(1-naphthylmethyl)carboxyamide]-2'-deoxyuridine
  misc_feature (21)..(21): n is 5-[N-(1-naphthylmethyl)carboxyamide]-2'-deoxyuridine
cgacagcangnannnacancn

SEQ ID NO: 540 - DNA, 21 bp, Artificial Sequence
  Synthetic
  misc_feature (9)..(9): n is 5-[N-(1-naphthylmethyl)carboxyamide]-2'-deoxyuridine
  misc_feature (10)..(10): n is 2'-O-methyl-guanosine
  misc_feature (11)..(11): n is 5-[N-(1-naphthylmethyl)carboxyamide]-2'-O-methyl-uridine
  misc_feature (12)..(12): n is 2'-O-methyl-adenosine
  misc_feature (13)..(13): n is 5-[N-(1-naphthylmethyl)carboxyamide]-2'-deoxyuridine
  misc_feature (19)..(19): n is 5-[N-(1-naphthylmethyl)carboxyamide]-2'-deoxyuridine
  misc_feature (21)..(21): n is 5-[N-(1-naphthylmethyl)carboxyamide]-2'-deoxyuridine
cgacagcannnnngcacancn

SEQ ID NO: 541 - DNA, 21 bp, Artificial Sequence
  Synthetic
  misc_feature (7)..(7): n is 2'-O-methyl-cytidine
  misc_feature (8)..(8): n is 2'-O-methyl-adenosine
  misc_feature (9)..(9): n is 5-[N-(1-naphthylmethyl)carboxyamide]-2'-O-methyl-uridine
  misc_feature (11)..(11): n is 5-[N-(1-naphthylmethyl)carboxyamide]-2'-deoxyuridine
  misc_feature (13)..(13): n is 5-[N-(1-naphthylmethyl)carboxyamide]-2'-deoxyuridine
  misc_feature (19)..(19): n is 5-[N-(1-naphthylmethyl)carboxyamide]-2'-deoxyuridine
  misc_feature (21)..(21): n is 5-[N-(1-naphthylmethyl)carboxyamide]-2'-deoxyuridine
cgacagnnngnangcacancn

SEQ ID NO: 542 - DNA, 21 bp, Artificial Sequence
  Synthetic
  misc_feature (4)..(4): n is 2'-O-methyl-cytidine
  misc_feature (5)..(5): n is 2'-O-methyl-adenosine
  misc_feature (6)..(6): n is 2'-O-methyl-guanosine
  misc_feature (9)..(9): n is 5-[N-(1-naphthylmethyl)carboxyamide]-2'-deoxyuridine
  misc_feature (11)..(11): n is 5-[N-(1-naphthylmethyl)carboxyamide]-2'-deoxyuridine
  misc_feature (13)..(13): n is 5-[N-(1-naphthylmethyl)carboxyamide]-2'-deoxyuridine
  misc_feature (19)..(19): n is 5-[N-(1-naphthylmethyl)carboxyamide]-2'-deoxyuridine
  misc_feature (21)..(21): n is 5-[N-(1-naphthylmethyl)carboxyamide]-2'-deoxyuridine
cgannncangnangcacancn

SEQ ID NO: 543 - DNA, 21 bp, Artificial Sequence
  Synthetic
  misc_feature (1)..(1): n is 2'-O-methyl-cytidine
  misc_feature (2)..(2): n is 2'-O-methyl-guanosine
  misc_feature (3)..(3): n is 2'-O-methyl-adenosine
  misc_feature (9)..(9): n is 5-[N-(1-naphthylmethyl)carboxyamide]-2'-deoxyuridine
  misc_feature (11)..(11): n is 5-[N-(1-naphthylmethyl)carboxyamide]-2'-deoxyuridine
  misc_feature (13)..(13): n is 5-[N-(1-naphthylmethyl)carboxyamide]-2'-deoxyuridine
  misc_feature (19)..(19): n is 5-[N-(1-naphthylmethyl)carboxyamide]-2'-deoxyuridine
  misc_feature (21)..(21): n is 5-[N-(1-naphthylmethyl)carboxyamide]-2'-deoxyuridine
nnncagcangnangcacancn

SEQ ID NO: 544 - DNA, 21 bp, Artificial Sequence
  Synthetic
  misc_feature (1)..(1): n is 2'-O-methyl-cytidine
  misc_feature (7)..(7): n is 2'-O-methyl-cytidine
  misc_feature (9)..(9): n is 5-[N-(1-naphthylmethyl)carboxyamide]-2'-deoxyuridine
  misc_feature (11)..(11): n is 5-[N-(1-naphthylmethyl)carboxyamide]-2'-deoxyuridine
  misc_feature (13)..(13): n is 5-[N-(1-naphthylmethyl)carboxyamide]-2'-deoxyuridine
  misc_feature (14)..(14): n is 2'-O-methyl-guanosine
  misc_feature (16)..(16): n is 2'-O-methyl-adenosine
  misc_feature (18)..(18): n is 2'-O-methyl-adenosine
  misc_feature (19)..(19): n is 5-[N-(1-naphthylmethyl)carboxyamide]-2'-deoxyuridine
  misc_feature (21)..(21): n is 5-[N-(1-naphthylmethyl)carboxyamide]-2'-O-methyl-uridine
ngacagnangnanncncnncn

SEQ ID NO: 545 - DNA, 21 bp, Artificial Sequence
  Synthetic
  misc_feature (1)..(1): n is 2'-O-methyl-cytidine
  misc_feature (4)..(4): n is 2'-O-methyl-cytidine
  misc_feature (6)..(6): n is 2'-O-methyl-guanosine
  misc_feature (7)..(7): n is 2'-O-methyl-cytidine
  misc_feature (9)..(9): n is 5-[N-(1-naphthylmethyl)carboxyamide]-2'-deoxyuridine
  misc_feature (11)..(11): n is 5-[N-(1-naphthylmethyl)carboxyamide]-2'-deoxyuridine
  misc_feature (13)..(13): n is 5-[N-(1-naphthylmethyl)carboxyamide]-2'-deoxyuridine
  misc_feature (14)..(14): n is 2'-O-methyl-guanosine
  misc_feature (15)..(15): n is 2'-O-methyl-cytidine
  misc_feature (16)..(16): n is 2'-O-methyl-adenosine
  misc_feature (17)..(17): n is 2'-O-methyl-cytidine
  misc_feature (18)..(18): n is 2'-O-methyl-adenosine
  misc_feature (19)..(19): n is 5-[N-(1-naphthylmethyl)carboxyamide]-2'-deoxyuridine
  misc_feature (20)..(20): n is 2'-O-methyl-cytidine
  misc_feature (21)..(21): n is 5-[N-(1-naphthylmethyl)carboxyamide]-2'-O-methyl-uridine
nganannangnannnnnnnnn

SEQ ID NO: 546 - DNA, 38 bp, Artificial Sequence
  Synthetic
  misc_feature (5)..(5): n is 5-[N-(1-naphthylmethyl)carboxyamide]-2'-deoxyuridine
  misc_feature (12)..(13): n is 5-[N-(1-naphthylmethyl)carboxyamide]-2'-deoxyuridine
  misc_feature (18)..(18): n is 5-[N-(1-naphthylmethyl)carboxyamide]-2'-deoxyuridine
  misc_feature (21)..(22): n is 5-[N-(1-naphthylmethyl)carboxyamide]-2'-deoxyuridine
  misc_feature (24)..(24): n is 5-[N-(1-naphthylmethyl)carboxyamide]-2'-deoxyuridine
  misc_feature (29)..(31): n is 5-[N-(1-naphthylmethyl)carboxyamide]-2'-deoxyuridine
  misc_feature (35)..(35): n is 5-[N-(1-naphthylmethyl)carboxyamide]-2'-deoxyuridine
tcaancagccgnncaagngcnngnaggannnaaangga

SEQ ID NO: 547 - DNA, 37 bp, Artificial Sequence
  Synthetic
  misc_feature (5)..(5): n is 5-[N-(1-naphthylmethyl)carboxyamide]-2'-deoxyuridine
  misc_feature (12)..(13): n is 5-[N-(1-naphthylmethyl)carboxyamide]-2'-deoxyuridine
  misc_feature (18)..(18): n is 5-[N-(1-naphthylmethyl)carboxyamide]-2'-deoxyuridine
  misc_feature (21)..(22): n is 5-[N-(1-naphthylmethyl)carboxyamide]-2'-deoxyuridine
  misc_feature (24)..(24): n is 5-[N-(1-naphthylmethyl)carboxyamide]-2'-deoxyuridine
  misc_feature (29)..(31): n is 5-[N-(1-naphthylmethyl)carboxyamide]-2'-deoxyuridine
  misc_feature (35)..(35): n is 5-[N-(1-naphthylmethyl)carboxyamide]-2'-deoxyuridine
tcaancagccgnncaagngcnngnaggannnaaangg

SEQ ID NO: 548 - DNA, 36 bp, Artificial Sequence
  Synthetic
  misc_feature (5)..(5): n is 5-[N-(1-naphthylmethyl)carboxyamide]-2'-deoxyuridine
  misc_feature (12)..(13): n is 5-[N-(1-naphthylmethyl)carboxyamide]-2'-deoxyuridine
  misc_feature (18)..(18): n is 5-[N-(1-naphthylmethyl)carboxyamide]-2'-deoxyuridine
  misc_feature (21)..(22): n is 5-[N-(1-naphthylmethyl)carboxyamide]-2'-deoxyuridine
  misc_feature (24)..(24): n is 5-[N-(1-naphthylmethyl)carboxyamide]-2'-deoxyuridine
  misc_feature (29)..(31): n is 5-[N-(1-naphthylmethyl)carboxyamide]-2'-deoxyuridine
  misc_feature (35)..(35): n is 5-[N-(1-naphthylmethyl)carboxyamide]-2'-deoxyuridine
tcaancagccgnncaagngcnngnaggannnaaang

SEQ ID NO: 549 - DNA, 35 bp, Artificial Sequence
  Synthetic
  misc_feature (5)..(5): n is 5-[N-(1-naphthylmethyl)carboxyamide]-2'-deoxyuridine
  misc_feature (12)..(13): n is 5-[N-(1-naphthylmethyl)carboxyamide]-2'-deoxyuridine
  misc_feature (18)..(18): n is 5-[N-(1-naphthylmethyl)carboxyamide]-2'-deoxyuridine
  misc_feature (21)..(22): n is 5-[N-(1-naphthylmethyl)carboxyamide]-2'-deoxyuridine
  misc_feature (24)..(24): n is 5-[N-(1-naphthylmethyl)carboxyamide]-2'-deoxyuridine
  misc_feature (29)..(31): n is 5-[N-(1-naphthylmethyl)carboxyamide]-2'-deoxyuridine
  misc_feature (35)..(35): n is 5-[N-(1-naphthylmethyl)carboxyamide]-2'-deoxyuridine
tcaancagccgnncaagngcnngnaggannnaaan

SEQ ID NO: 550 - DNA, 39 bp, Artificial Sequence
  Synthetic
  misc_feature (4)..(4): n is 5-[N-(1-naphthylmethyl)carboxyamide]-2'-deoxyuridine
  misc_feature (11)..(12): n is 5-[N-(1-naphthylmethyl)carboxyamide]-2'-deoxyuridine
  misc_feature (17)..(17): n is 5-[N-(1-naphthylmethyl)carboxyamide]-2'-deoxyuridine
  misc_feature (20)..(21): n is 5-[N-(1-naphthylmethyl)carboxyamide]-2'-deoxyuridine
  misc_feature (23)..(23): n is 5-[N-(1-naphthylmethyl)carboxyamide]-2'-deoxyuridine
  misc_feature (28)..(30): n is 5-[N-(1-naphthylmethyl)carboxyamide]-2'-deoxyuridine
  misc_feature (34)..(34): n is 5-[N-(1-naphthylmethyl)carboxyamide]-2'-deoxyuridine
  misc_feature (39)..(39): n is 5-[N-(1-naphthylmethyl)carboxyamide]-2'-deoxyuridine
caancagccgnncaagngcnngnaggannnaaanggaan

SEQ ID NO: 551 - DNA, 38 bp, Artificial Sequence
  Synthetic
  misc_feature (3)..(3): n is 5-[N-(1-naphthylmethyl)carboxyamide]-2'-deoxyuridine
  misc_feature (10)..(11): n is 5-[N-(1-naphthylmethyl)carboxyamide]-2'-deoxyuridine
  misc_feature (16)..(16): n is 5-[N-(1-naphthylmethyl)carboxyamide]-2'-deoxyuridine
  misc_feature (19)..(20): n is 5-[N-(1-naphthylmethyl)carboxyamide]-2'-deoxyuridine
  misc_feature (22)..(22): n is 5-[N-(1-naphthylmethyl)carboxyamide]-2'-deoxyuridine
  misc_feature (27)..(29): n is 5-[N-(1-naphthylmethyl)carboxyamide]-2'-deoxyuridine
  misc_feature (33)..(33): n is 5-[N-(1-naphthylmethyl)carboxyamide]-2'-deoxyuridine
  misc_feature (38)..(38): n is 5-[N-(1-naphthylmethyl)carboxyamide]-2'-deoxyuridine
aancagccgnncaagngcnngnaggannnaaanggaan

SEQ ID NO: 552 - DNA, 37 bp, Artificial Sequence
  Synthetic
  misc_feature (2)..(2): n is 5-[N-(1-naphthylmethyl)carboxyamide]-2'-deoxyuridine
  misc_feature (9)..(10): n is 5-[N-(1-naphthylmethyl)carboxyamide]-2'-deoxyuridine
  misc_feature (15)..(15): n is 5-[N-(1-naphthylmethyl)carboxyamide]-2'-deoxyuridine
  misc_feature (18)..(19): n is 5-[N-(1-naphthylmethyl)carboxyamide]-2'-deoxyuridine
  misc_feature (21)..(21): n is 5-[N-(1-naphthylmethyl)carboxyamide]-2'-deoxyuridine
  misc_feature (26)..(28): n is 5-[N-(1-naphthylmethyl)carboxyamide]-2'-deoxyuridine
  misc_feature (32)..(32): n is 5-[N-(1-naphthylmethyl)carboxyamide]-2'-deoxyuridine
  misc_feature (37)..(37): n is 5-[N-(1-naphthylmethyl)carboxyamide]-2'-deoxyuridine
ancagccgnncaagngcnngnaggannnaaanggaan

SEQ ID NO: 553 - DNA, 36 bp, Artificial Sequence
  Synthetic
  misc_feature (1)..(1): n is 5-[N-(1-naphthylmethyl)carboxyamide]-2'-deoxyuridine
  misc_feature (8)..(9): n is 5-[N-(1-naphthylmethyl)carboxyamide]-2'-deoxyuridine
  misc_feature (14)..(14): n is 5-[N-(1-naphthylmethyl)carboxyamide]-2'-deoxyuridine
  misc_feature (17)..(18): n is 5-[N-(1-naphthylmethyl)carboxyamide]-2'-deoxyuridine
  misc_feature (20)..(20): n is 5-[N-(1-naphthylmethyl)carboxyamide]-2'-deoxyuridine
  misc_feature (25)..(27): n is 5-[N-(1-naphthylmethyl)carboxyamide]-2'-deoxyuridine
  misc_feature (31)..(31): n is 5-[N-(1-naphthylmethyl)carboxyamide]-2'-deoxyuridine
  misc_feature (36)..(36): n is 5-[N-(1-naphthylmethyl)carboxyamide]-2'-deoxyuridine
ncagccgnncaagngcnngnaggannnaaanggaan

SEQ ID NO: 554 - DNA, 35 bp, Artificial Sequence
  Synthetic
  misc_feature (7)..(8): n is 5-[N-(1-naphthylmethyl)carboxyamide]-2'-deoxyuridine
  misc_feature (13)..(13): n is 5-[N-(1-naphthylmethyl)carboxyamide]-2'-deoxyuridine
  misc_feature (16)..(17): n is 5-[N-(1-naphthylmethyl)carboxyamide]-2'-deoxyuridine
  misc_feature (19)..(19): n is 5-[N-(1-naphthylmethyl)carboxyamide]-2'-deoxyuridine
  misc_feature (24)..(26): n is 5-[N-(1-naphthylmethyl)carboxyamide]-2'-deoxyuridine
  misc_feature (30)..(30): n is 5-[N-(1-naphthylmethyl)carboxyamide]-2'-deoxyuridine
  misc_feature (35)..(35): n is 5-[N-(1-naphthylmethyl)carboxyamide]-2'-deoxyuridine
cagccgnncaagngcnngnaggannnaaanggaan

SEQ ID NO: 555 - DNA, 34 bp, Artificial Sequence
  Synthetic
  misc_feature (6)..(7): n is 5-[N-(1-naphthylmethyl)carboxyamide]-2'-deoxyuridine
  misc_feature (12)..(12): n is 5-[N-(1-naphthylmethyl)carboxyamide]-2'-deoxyuridine
  misc_feature (15)..(16): n is 5-[N-(1-naphthylmethyl)carboxyamide]-2'-deoxyuridine
  misc_feature (18)..(18): n is 5-[N-(1-naphthylmethyl)carboxyamide]-2'-deoxyuridine
  misc_feature (23)..(25): n is 5-[N-(1-naphthylmethyl)carboxyamide]-2'-deoxyuridine
  misc_feature (29)..(29): n is 5-[N-(1-naphthylmethyl)carboxyamide]-2'-deoxyuridine
  misc_feature (34)..(34): n is 5-[N-(1-naphthylmethyl)carboxyamide]-2'-deoxyuridine
agccgnncaagngcnngnaggannnaaanggaan

SEQ ID NO: 556 - DNA, 38 bp, Artificial Sequence
  Synthetic
  misc_feature (4)..(4): n is 5-[N-(1-naphthylmethyl)carboxyamide]-2'-deoxyuridine
  misc_feature (11)..(12): n is 5-[N-(1-naphthylmethyl)carboxyamide]-2'-deoxyuridine
  misc_feature (17)..(17): n is 5-[N-(1-naphthylmethyl)carboxyamide]-2'-deoxyuridine
  misc_feature (20)..(21): n is 5-[N-(1-naphthylmethyl)carboxyamide]-2'-deoxyuridine
  misc_feature (23)..(23): n is 5-[N-(1-naphthylmethyl)carboxyamide]-2'-deoxyuridine
  misc_feature (28)..(30): n is 5-[N-(1-naphthylmethyl)carboxyamide]-2'-deoxyuridine
  misc_feature (34)..(34): n is 5-[N-(1-naphthylmethyl)carboxyamide]-2'-deoxyuridine
caancagccgnncaagngcnngnaggannnaaanggaa

SEQ ID NO: 557 - DNA, 37 bp, Artificial Sequence
  Synthetic
  misc_feature (3)..(3): n is 5-[N-(1-naphthylmethyl)carboxyamide]-2'-deoxyuridine
  misc_feature (10)..(11): n is 5-[N-(1-naphthylmethyl)carboxyamide]-2'-deoxyuridine
  misc_feature (16)..(16): n is 5-[N-(1-naphthylmethyl)carboxyamide]-2'-deoxyuridine
  misc_feature (19)..(20): n is 5-[N-(1-naphthylmethyl)carboxyamide]-2'-deoxyuridine
  misc_feature (22)..(22): n is 5-[N-(1-naphthylmethyl)carboxyamide]-2'-deoxyuridine
  misc_feature (27)..(29): n is 5-[N-(1-naphthylmethyl)carboxyamide]-2'-deoxyuridine
  misc_feature (33)..(33): n is 5-[N-(1-naphthylmethyl)carboxyamide]-2'-deoxyuridine
aancagccgnncaagngcnngnaggannnaaanggaa

SEQ ID NO: 558 - DNA, 36 bp, Artificial Sequence
  Synthetic
  misc_feature (2)..(2): n is 5-[N-(1-naphthylmethyl)carboxyamide]-2'-deoxyuridine
  misc_feature (9)..(10): n is 5-[N-(1-naphthylmethyl)carboxyamide]-2'-deoxyuridine
  misc_feature (15)..(15): n is 5-[N-(1-naphthylmethyl)carboxyamide]-2'-deoxyuridine
  misc_feature (18)..(19): n is 5-[N-(1-naphthylmethyl)carboxyamide]-2'-deoxyuridine
  misc_feature (21)..(21): n is 5-[N-(1-naphthylmethyl)carboxyamide]-2'-deoxyuridine
  misc_feature (26)..(28): n is 5-[N-(1-naphthylmethyl)carboxyamide]-2'-deoxyuridine
  misc_feature (32)..(32): n is 5-[N-(1-naphthylmethyl)carboxyamide]-2'-deoxyuridine
ancagccgnncaagngcnngnaggannnaaanggaa

SEQ ID NO: 559 - DNA, 35 bp, Artificial Sequence
  Synthetic
  misc_feature (1)..(1): n is 5-[N-(1-naphthylmethyl)carboxyamide]-2'-deoxyuridine
  misc_feature (8)..(9): n is 5-[N-(1-naphthylmethyl)carboxyamide]-2'-deoxyuridine
  misc_feature (14)..(14): n is 5-[N-(1-naphthylmethyl)carboxyamide]-2'-deoxyuridine
  misc_feature (17)..(18): n is 5-[N-(1-naphthylmethyl)carboxyamide]-2'-deoxyuridine
  misc_feature (20)..(20): n is 5-[N-(1-naphthylmethyl)carboxyamide]-2'-deoxyuridine
  misc_feature (25)..(27): n is 5-[N-(1-naphthylmethyl)carboxyamide]-2'-deoxyuridine
  misc_feature (31)..(31): n is 5-[N-(1-naphthylmethyl)carboxyamide]-2'-deoxyuridine
ncagccgnncaagngcnngnaggannnaaanggaa

SEQ ID NO: 560 - DNA, 34 bp, Artificial Sequence
  Synthetic
  misc_feature (7)..(8): n is 5-[N-(1-naphthylmethyl)carboxyamide]-2'-deoxyuridine
  misc_feature (13)..(13): n is 5-[N-(1-naphthylmethyl)carboxyamide]-2'-deoxyuridine
  misc_feature (16)..(17): n is 5-[N-(1-naphthylmethyl)carboxyamide]-2'-deoxyuridine
  misc_feature (19)..(19): n is 5-[N-(1-naphthylmethyl)carboxyamide]-2'-deoxyuridine
  misc_feature (24)..(26): n is 5-[N-(1-naphthylmethyl)carboxyamide]-2'-deoxyuridine
  misc_feature (30)..(30): n is 5-[N-(1-naphthylmethyl)carboxyamide]-2'-deoxyuridine
cagccgnncaagngcnngnaggannnaaanggaa

SEQ ID NO: 561 - DNA, 33 bp, Artificial Sequence
  Synthetic
  misc_feature (6)..(7): n is 5-[N-(1-naphthylmethyl)carboxyamide]-2'-deoxyuridine
  misc_feature (12)..(12): n is 5-[N-(1-naphthylmethyl)carboxyamide]-2'-deoxyuridine
  misc_feature (15)..(16): n is 5-[N-(1-naphthylmethyl)carboxyamide]-2'-deoxyuridine
  misc_feature (18)..(18): n is 5-[N-(1-naphthylmethyl)carboxyamide]-2'-deoxyuridine
  misc_feature (23)..(25): n is 5-[N-(1-naphthylmethyl)carboxyamide]-2'-deoxyuridine
  misc_feature (29)..(29): n is 5-[N-(1-naphthylmethyl)carboxyamide]-2'-deoxyuridine
agccgnncaagngcnngnaggannnaaanggaa

SEQ ID NO: 562 - DNA, 37 bp, Artificial Sequence
  Synthetic
  misc_feature (4)..(4): n is 5-[N-(1-naphthylmethyl)carboxyamide]-2'-deoxyuridine
  misc_feature (11)..(12): n is 5-[N-(1-naphthylmethyl)carboxyamide]-2'-deoxyuridine
  misc_feature (17)..(17): n is 5-[N-(1-naphthylmethyl)carboxyamide]-2'-deoxyuridine
  misc_feature (20)..(21): n is 5-[N-(1-naphthylmethyl)carboxyamide]-2'-deoxyuridine
  misc_feature (23)..(23): n is 5-[N-(1-naphthylmethyl)carboxyamide]-2'-deoxyuridine
  misc_feature (28)..(30): n is 5-[N-(1-naphthylmethyl)carboxyamide]-2'-deoxyuridine
  misc_feature (34)..(34): n is 5-[N-(1-naphthylmethyl)carboxyamide]-2'-deoxyuridine
caancagccgnncaagngcnngnaggannnaaangga

SEQ ID NO: 563 - DNA, 36 bp, Artificial Sequence
  Synthetic
  misc_feature (3)..(3): n is 5-[N-(1-naphthylmethyl)carboxyamide]-2'-deoxyuridine
  misc_feature (10)..(11): n is 5-[N-(1-naphthylmethyl)carboxyamide]-2'-deoxyuridine
  misc_feature (16)..(16): n is 5-[N-(1-naphthylmethyl)carboxyamide]-2'-deoxyuridine
  misc_feature (19)..(20): n is 5-[N-(1-naphthylmethyl)carboxyamide]-2'-deoxyuridine
  misc_feature (22)..(22): n is 5-[N-(1-naphthylmethyl)carboxyamide]-2'-deoxyuridine
  misc_feature (27)..(29): n is 5-[N-(1-naphthylmethyl)carboxyamide]-2'-deoxyuridine
  misc_feature (33)..(33): n is 5-[N-(1-naphthylmethyl)carboxyamide]-2'-deoxyuridine
aancagccgnncaagngcnngnaggannnaaangga

SEQ ID NO: 564 - DNA, 35 bp, Artificial Sequence
  Synthetic
  misc_feature (2)..(2): n is 5-[N-(1-naphthylmethyl)carboxyamide]-2'-deoxyuridine
  misc_feature (9)..(10): n is 5-[N-(1-naphthylmethyl)carboxyamide]-2'-deoxyuridine
  misc_feature (15)..(15): n is 5-[N-(1-naphthylmethyl)carboxyamide]-2'-deoxyuridine
  misc_feature (18)..(19): n is 5-[N-(1-naphthylmethyl)carboxyamide]-2'-deoxyuridine
  misc_feature (21)..(21): n is 5-[N-(1-naphthylmethyl)carboxyamide]-2'-deoxyuridine
  misc_feature (26)..(28): n is 5-[N-(1-naphthylmethyl)carboxyamide]-2'-deoxyuridine
  misc_feature (32)..(32): n is 5-[N-(1-naphthylmethyl)carboxyamide]-2'-deoxyuridine
ancagccgnncaagngcnngnaggannnaaangga

SEQ ID NO: 565 - DNA, 34 bp, Artificial Sequence
  Synthetic
  misc_feature (1)..(1): n is 5-[N-(1-naphthylmethyl)carboxyamide]-2'-deoxyuridine
  misc_feature (8)..(9): n is 5-[N-(1-naphthylmethyl)carboxyamide]-2'-deoxyuridine
  misc_feature (14)..(14): n is 5-[N-(1-naphthylmethyl)carboxyamide]-2'-deoxyuridine
  misc_feature (17)..(18): n is 5-[N-(1-naphthylmethyl)carboxyamide]-2'-deoxyuridine
  misc_feature (20)..(20): n is 5-[N-(1-naphthylmethyl)carboxyamide]-2'-deoxyuridine
  misc_feature (25)..(27): n is 5-[N-(1-naphthylmethyl)carboxyamide]-2'-deoxyuridine
  misc_feature (31)..(31): n is 5-[N-(1-naphthylmethyl)carboxyamide]-2'-deoxyuridine
ncagccgnncaagngcnngnaggannnaaangga

SEQ ID NO: 566 - DNA, 33 bp, Artificial Sequence
  Synthetic
  misc_feature (7)..(8): n is 5-[N-(1-naphthylmethyl)carboxyamide]-2'-deoxyuridine
  misc_feature (13)..(13): n is 5-[N-(1-naphthylmethyl)carboxyamide]-2'-deoxyuridine
  misc_feature (16)..(17): n is 5-[N-(1-naphthylmethyl)carboxyamide]-2'-deoxyuridine
  misc_feature (19)..(19): n is 5-[N-(1-naphthylmethyl)carboxyamide]-2'-deoxyuridine
  misc_feature (24)..(26): n is 5-[N-(1-naphthylmethyl)carboxyamide]-2'-deoxyuridine
  misc_feature (30)..(30): n is 5-[N-(1-naphthylmethyl)carboxyamide]-2'-deoxyuridine
cagccgnncaagngcnngnaggannnaaangga

SEQ ID NO: 567 - DNA, 32 bp, Artificial Sequence
  Synthetic
  misc_feature (6)..(7): n is 5-[N-(1-naphthylmethyl)carboxyamide]-2'-deoxyuridine
  misc_feature (12)..(12): n is 5-[N-(1-naphthylmethyl)carboxyamide]-2'-deoxyuridine
  misc_feature (15)..(16): n is 5-[N-(1-naphthylmethyl)carboxyamide]-2'-deoxyuridine
  misc_feature (18)..(18): n is 5-[N-(1-naphthylmethyl)carboxyamide]-2'-deoxyuridine
  misc_feature (23)..(25): n is 5-[N-(1-naphthylmethyl)carboxyamide]-2'-deoxyuridine
  misc_feature (29)..(29): n is 5-[N-(1-naphthylmethyl)carboxyamide]-2'-deoxyuridine
agccgnncaagngcnngnaggannnaaangga

SEQ ID NO: 568 - DNA, 32 bp, Artificial Sequence
  Synthetic
  misc_feature (7)..(8): n is 5-[N-(1-naphthylmethyl)carboxyamide]-2'-deoxyuridine
  misc_feature (13)..(13): n is 5-[N-(1-naphthylmethyl)carboxyamide]-2'-deoxyuridine
  misc_feature (16)..(17): n is 5-[N-(1-naphthylmethyl)carboxyamide]-2'-deoxyuridine
  misc_feature (19)..(19): n is 5-[N-(1-naphthylmethyl)carboxyamide]-2'-deoxyuridine
  misc_feature (24)..(26): n is 5-[N-(1-naphthylmethyl)carboxyamide]-2'-deoxyuridine
  misc_feature (30)..(30): n is 5-[N-(1-naphthylmethyl)carboxyamide]-2'-deoxyuridine
cagccgnncaagngcnngnaggannnaaangg

SEQ ID NO: 569 - DNA, 31 bp, Artificial Sequence
  Synthetic
  misc_feature (7)..(8): n is 5-[N-(1-naphthylmethyl)carboxyamide]-2'-deoxyuridine
  misc_feature (13)..(13): n is 5-[N-(1-naphthylmethyl)carboxyamide]-2'-deoxyuridine
  misc_feature (16)..(17): n is 5-[N-(1-naphthylmethyl)carboxyamide]-2'-deoxyuridine
  misc_feature (19)..(19): n is 5-[N-(1-naphthylmethyl)carboxyamide]-2'-deoxyuridine
  misc_feature (24)..(26): n is 5-[N-(1-naphthylmethyl)carboxyamide]-2'-deoxyuridine
  misc_feature (30)..(30): n is 5-[N-(1-naphthylmethyl)carboxyamide]-2'-deoxyuridine
cagccgnncaagngcnngnaggannnaaang

SEQ ID NO: 570 - DNA, 30 bp, Artificial Sequence
  Synthetic
  misc_feature (7)..(8): n is 5-[N-(1-naphthylmethyl)carboxyamide]-2'-deoxyuridine
  misc_feature (13)..(13): n is 5-[N-(1-naphthylmethyl)carboxyamide]-2'-deoxyuridine
  misc_feature (16)..(17): n is 5-[N-(1-naphthylmethyl)carboxyamide]-2'-deoxyuridine
  misc_feature (19)..(19): n is 5-[N-(1-naphthylmethyl)carboxyamide]-2'-deoxyuridine
  misc_feature (24)..(26): n is 5-[N-(1-naphthylmethyl)carboxyamide]-2'-deoxyuridine
  misc_feature (30)..(30): n is 5-[N-(1-naphthylmethyl)carboxyamide]-2'-deoxyuridine
cagccgnncaagngcnngnaggannnaaan

SEQ ID NO: 571 - DNA, 29 bp, Artificial Sequence
  Synthetic
  misc_feature (7)..(8): n is 5-[N-(1-naphthylmethyl)carboxyamide]-2'-deoxyuridine
  misc_feature (13)..(13): n is 5-[N-(1-naphthylmethyl)carboxyamide]-2'-deoxyuridine
  misc_feature (16)..(17): n is 5-[N-(1-naphthylmethyl)carboxyamide]-2'-deoxyuridine
  misc_feature (19)..(19): n is 5-[N-(1-naphthylmethyl)carboxyamide]-2'-deoxyuridine
  misc_feature (24)..(26): n is 5-[N-(1-naphthylmethyl)carboxyamide]-2'-deoxyuridine
cagccgnncaagngcnngnaggannnaaa

SEQ ID NO: 572 - DNA, 28 bp, Artificial Sequence
  Synthetic
  misc_feature (7)..(8): n is 5-[N-(1-naphthylmethyl)carboxyamide]-2'-deoxyuridine
  misc_feature (13)..(13): n is 5-[N-(1-naphthylmethyl)carboxyamide]-2'-deoxyuridine
  misc_feature (16)..(17): n is 5-[N-(1-naphthylmethyl)carboxyamide]-2'-deoxyuridine
  misc_feature (19)..(19): n is 5-[N-(1-naphthylmethyl)carboxyamide]-2'-deoxyuridine
  misc_feature (24)..(26): n is 5-[N-(1-naphthylmethyl)carboxyamide]-2'-deoxyuridine
cagccgnncaagngcnngnaggannnaa

SEQ ID NO: 573 - DNA, 27 bp, Artificial Sequence
  Synthetic
  misc_feature (7)..(8): n is 5-[N-(1-naphthylmethyl)carboxyamide]-2'-deoxyuridine
  misc_feature (13)..(13): n is 5-[N-(1-naphthylmethyl)carboxyamide]-2'-deoxyuridine
  misc_feature (16)..(17): n is 5-[N-(1-naphthylmethyl)carboxyamide]-2'-deoxyuridine
  misc_feature (19)..(19): n is 5-[N-(1-naphthylmethyl)carboxyamide]-2'-deoxyuridine
  misc_feature (24)..(26): n is 5-[N-(1-naphthylmethyl)carboxyamide]-2'-deoxyuridine
cagccgnncaagngcnngnaggannna

SEQ ID NO: 574 - DNA, 26 bp, Artificial Sequence
  Synthetic
  misc_feature (7)..(8): n is 5-[N-(1-naphthylmethyl)carboxyamide]-2'-deoxyuridine
  misc_feature (13)..(13): n is 5-[N-(1-naphthylmethyl)carboxyamide]-2'-deoxyuridine
  misc_feature (16)..(17): n is 5-[N-(1-naphthylmethyl)carboxyamide]-2'-deoxyuridine
  misc_feature (19)..(19): n is 5-[N-(1-naphthylmethyl)carboxyamide]-2'-deoxyuridine
  misc_feature (24)..(26): n is 5-[N-(1-naphthylmethyl)carboxyamide]-2'-deoxyuridine
cagccgnncaagngcnngnaggannn

SEQ ID NO: 575 - DNA, 31 bp, Artificial Sequence
  Synthetic
  misc_feature (6)..(7): n is 5-[N-(1-naphthylmethyl)carboxyamide]-2'-deoxyuridine
  misc_feature (12)..(12): n is 5-[N-(1-naphthylmethyl)carboxyamide]-2'-deoxyuridine
  misc_feature (15)..(16): n is 5-[N-(1-naphthylmethyl)carboxyamide]-2'-deoxyuridine
  misc_feature (18)..(18): n is 5-[N-(1-naphthylmethyl)carboxyamide]-2'-deoxyuridine
  misc_feature (23)..(25): n is 5-[N-(1-naphthylmethyl)carboxyamide]-2'-deoxyuridine
  misc_feature (29)..(29): n is 5-[N-(1-naphthylmethyl)carboxyamide]-2'-deoxyuridine
agccgnncaagngcnngnaggannnaaangg

SEQ ID NO: 576 - DNA, 30 bp, Artificial Sequence
  Synthetic
  misc_feature (6)..(7): n is 5-[N-(1-naphthylmethyl)carboxyamide]-2'-deoxyuridine
  misc_feature (12)..(12): n is 5-[N-(1-naphthylmethyl)carboxyamide]-2'-deoxyuridine
  misc_feature (15)..(16): n is 5-[N-(1-naphthylmethyl)carboxyamide]-2'-deoxyuridine
  misc_feature (18)..(18): n is 5-[N-(1-naphthylmethyl)carboxyamide]-2'-deoxyuridine
  misc_feature (23)..(25): n is 5-[N-(1-naphthylmethyl)carboxyamide]-2'-deoxyuridine
  misc_feature (29)..(29): n is 5-[N-(1-naphthylmethyl)carboxyamide]-2'-deoxyuridine
agccgnncaagngcnngnaggannnaaang

SEQ ID NO: 577 - DNA, 29 bp, Artificial Sequence
  Synthetic
  misc_feature (6)..(7): n is 5-[N-(1-naphthylmethyl)carboxyamide]-2'-deoxyuridine
  misc_feature (12)..(12): n is 5-[N-(1-naphthylmethyl)carboxyamide]-2'-deoxyuridine
  misc_feature (15)..(16): n is 5-[N-(1-naphthylmethyl)carboxyamide]-2'-deoxyuridine
  misc_feature (18)..(18): n is 5-[N-(1-naphthylmethyl)carboxyamide]-2'-deoxyuridine
  misc_feature (23)..(25): n is 5-[N-(1-naphthylmethyl)carboxyamide]-2'-deoxyuridine
  misc_feature (29)..(29): n is 5-[N-(1-naphthylmethyl)carboxyamide]-2'-deoxyuridine
agccgnncaagngcnngnaggannnaaan

SEQ ID NO: 578 - DNA, 28 bp, Artificial Sequence
  Synthetic
  misc_feature (6)..(7): n is 5-[N-(1-naphthylmethyl)carboxyamide]-2'-deoxyuridine
  misc_feature (12)..(12): n is 5-[N-(1-naphthylmethyl)carboxyamide]-2'-deoxyuridine
  misc_feature (15)..(16): n is 5-[N-(1-naphthylmethyl)carboxyamide]-2'-deoxyuridine
  misc_feature (18)..(18): n is 5-[N-(1-naphthylmethyl)carboxyamide]-2'-deoxyuridine
  misc_feature (23)..(25): n is 5-[N-(1-naphthylmethyl)carboxyamide]-2'-deoxyuridine
agccgnncaagngcnngnaggannnaaa

SEQ ID NO: 579 - DNA, 27 bp, Artificial Sequence
  Synthetic
  misc_feature (6)..(7): n is 5-[N-(1-naphthylmethyl)carboxyamide]-2'-deoxyuridine
  misc_feature (12)..(12): n is 5-[N-(1-naphthylmethyl)carboxyamide]-2'-deoxyuridine
  misc_feature (15)..(16): n is 5-[N-(1-naphthylmethyl)carboxyamide]-2'-deoxyuridine
  misc_feature (18)..(18): n is 5-[N-(1-naphthylmethyl)carboxyamide]-2'-deoxyuridine
  misc_feature (23)..(25): n is 5-[N-(1-naphthylmethyl)carboxyamide]-2'-deoxyuridine
agccgnncaagngcnngnaggannnaa

SEQ ID NO: 580 - DNA, 26 bp, Artificial Sequence
  Synthetic
  misc_feature (6)..(7): n is 5-[N-(1-naphthylmethyl)carboxyamide]-2'-deoxyuridine
  misc_feature (12)..(12): n is 5-[N-(1-naphthylmethyl)carboxyamide]-2'-deoxyuridine
  misc_feature (15)..(16): n is 5-[N-(1-naphthylmethyl)carboxyamide]-2'-deoxyuridine
  misc_feature (18)..(18): n is 5-[N-(1-naphthylmethyl)carboxyamide]-2'-deoxyuridine
  misc_feature (23)..(25): n is 5-[N-(1-naphthylmethyl)carboxyamide]-2'-deoxyuridine
agccgnncaagngcnngnaggannna

SEQ ID NO: 581 - DNA, 25 bp, Artificial Sequence
  Synthetic
  misc_feature (6)..(7): n is 5-[N-(1-naphthylmethyl)carboxyamide]-2'-deoxyuridine
  misc_feature (12)..(12): n is 5-[N-(1-naphthylmethyl)carboxyamide]-2'-deoxyuridine
  misc_feature (15)..(16): n is 5-[N-(1-naphthylmethyl)carboxyamide]-2'-deoxyuridine
  misc_feature (18)..(18): n is 5-[N-(1-naphthylmethyl)carboxyamide]-2'-deoxyuridine
  misc_feature (23)..(25): n is 5-[N-(1-naphthylmethyl)carboxyamide]-2'-deoxyuridine
agccgnncaagngcnngnaggannn

SEQ ID NO: 582 - DNA, 31 bp, Artificial Sequence
  Synthetic
  misc_feature (5)..(6): n is 5-[N-(1-naphthylmethyl)carboxyamide]-2'-deoxyuridine
  misc_feature (11)..(11): n is 5-[N-(1-naphthylmethyl)carboxyamide]-2'-deoxyuridine
  misc_feature (14)..(15): n is 5-[N-(1-naphthylmethyl)carboxyamide]-2'-deoxyuridine
  misc_feature (17)..(17): n is 5-[N-(1-naphthylmethyl)carboxyamide]-2'-deoxyuridine
  misc_feature (22)..(24): n is 5-[N-(1-naphthylmethyl)carboxyamide]-2'-deoxyuridine
  misc_feature (28)..(28): n is 5-[N-(1-naphthylmethyl)carboxyamide]-2'-deoxyuridine
gccgnncaagngcnngnaggannnaaangga

SEQ ID NO: 583 - DNA, 30 bp, Artificial Sequence
  Synthetic
  misc_feature (4)..(5): n is 5-[N-(1-naphthylmethyl)carboxyamide]-2'-deoxyuridine
  misc_feature (10)..(10): n is 5-[N-(1-naphthylmethyl)carboxyamide]-2'-deoxyuridine
  misc_feature (13)..(14): n is 5-[N-(1-naphthylmethyl)carboxyamide]-2'-deoxyuridine
  misc_feature (16)..(16): n is 5-[N-(1-naphthylmethyl)carboxyamide]-2'-deoxyuridine
  misc_feature (21)..(23): n is 5-[N-(1-naphthylmethyl)carboxyamide]-2'-deoxyuridine
  misc_feature (27)..(27): n is 5-[N-(1-naphthylmethyl)carboxyamide]-2'-deoxyuridine
ccgnncaagngcnngnaggannnaaangga

SEQ ID NO: 584 - DNA, 29 bp, Artificial Sequence
  Synthetic
  misc_feature (3)..(4): n is 5-[N-(1-naphthylmethyl)carboxyamide]-2'-deoxyuridine
  misc_feature (9)..(9): n is 5-[N-(1-naphthylmethyl)carboxyamide]-2'-deoxyuridine
  misc_feature (12)..(13): n is 5-[N-(1-naphthylmethyl)carboxyamide]-2'-deoxyuridine
  misc_feature (15)..(15): n is 5-[N-(1-naphthylmethyl)carboxyamide]-2'-deoxyuridine
  misc_feature (20)..(22): n is 5-[N-(1-naphthylmethyl)carboxyamide]-2'-deoxyuridine
  misc_feature (26)..(26): n is 5-[N-(1-naphthylmethyl)carboxyamide]-2'-deoxyuridine
cgnncaagngcnngnaggannnaaangga

SEQ ID NO: 585 - DNA, 28 bp, Artificial Sequence
  Synthetic
  misc_feature (2)..(3): n is 5-[N-(1-naphthylmethyl)carboxyamide]-2'-deoxyuridine
  misc_feature (8)..(8): n is 5-[N-(1-naphthylmethyl)carboxyamide]-2'-deoxyuridine
  misc_feature (11)..(12): n is 5-[N-(1-naphthylmethyl)carboxyamide]-2'-deoxyuridine
  misc_feature (14)..(14): n is 5-[N-(1-naphthylmethyl)carboxyamide]-2'-deoxyuridine
  misc_feature (19)..(21): n is 5-[N-(1-naphthylmethyl)carboxyamide]-2'-deoxyuridine
  misc_feature (25)..(25): n is 5-[N-(1-naphthylmethyl)carboxyamide]-2'-deoxyuridine
gnncaagngcnngnaggannnaaangga

SEQ ID NO: 586 - DNA, 29 bp, Artificial Sequence
  Synthetic
  misc_feature (4)..(5): n is 5-[N-(1-naphthylmethyl)carboxyamide]-2'-deoxyuridine
  misc_feature (10)..(10): n is 5-[N-(1-naphthylmethyl)carboxyamide]-2'-deoxyuridine
  misc_feature (13)..(14): n is 5-[N-(1-naphthylmethyl)carboxyamide]-2'-deoxyuridine
  misc_feature (16)..(16): n is 5-[N-(1-naphthylmethyl)carboxyamide]-2'-deoxyuridine
  misc_feature (21)..(23): n is 5-[N-(1-naphthylmethyl)carboxyamide]-2'-deoxyuridine
  misc_feature (27)..(27): n is 5-[N-(1-naphthylmethyl)carboxyamide]-2'-deoxyuridine
ccgnncaagngcnngnaggannnaaangg

SEQ ID NO: 587 - DNA, 30 bp, Artificial Sequence
  Synthetic
  misc_feature (5)..(6): n is 5-[N-(1-naphthylmethyl)carboxyamide]-2'-deoxyuridine
  misc_feature (11)..(11): n is 5-[N-(1-naphthylmethyl)carboxyamide]-2'-deoxyuridine
  misc_feature (14)..(15): n is 5-[N-(1-naphthylmethyl)carboxyamide]-2'-deoxyuridine
  misc_feature (17)..(17): n is 5-[N-(1-naphthylmethyl)carboxyamide]-2'-deoxyuridine
  misc_feature (22)..(24): n is 5-[N-(1-naphthylmethyl)carboxyamide]-2'-deoxyuridine
  misc_feature (28)..(28): n is 5-[N-(1-naphthylmethyl)carboxyamide]-2'-deoxyuridine
gccgnncaagngcnngnaggannnaaangg

SEQ ID NO: 588 - DNA, 50 bp, Artificial Sequence
  Synthetic
  misc_feature (8)..(8): n is 5-[N-(1-naphthylmethyl)carboxyamide]-2'-deoxyuridine
  misc_feature (15)..(16): n is 5-[N-(1-naphthylmethyl)carboxyamide]-2'-deoxyuridine
  misc_feature (21)..(21): n is 5-[N-(1-naphthylmethyl)carboxyamide]-2'-deoxyuridine
  misc_feature (24)..(25): n is 5-[N-(1-naphthylmethyl)carboxyamide]-2'-deoxyuridine
  misc_feature (27)..(27): n is 5-[N-(1-naphthylmethyl)carboxyamide]-2'-deoxyuridine
  misc_feature (32)..(34): n is 5-[N-(1-naphthylmethyl)carboxyamide]-2'-deoxyuridine
  misc_feature (38)..(38): n is 5-[N-(1-naphthylmethyl)carboxyamide]-2'-deoxyuridine
  misc_feature (43)..(44): n is 5-[N-(1-naphthylmethyl)carboxyamide]-2'-deoxyuridine
ccctccancagccgnncaagngcnngnaggannnaaanggaannggagga

SEQ ID NO: 589 - DNA, 50 bp, Artificial Sequence
  Synthetic
  misc_feature (1)..(1): n is 1,3-propane diol
  misc_feature (8)..(8): n is 5-[N-(1-naphthylmethyl)carboxyamide]-2'-deoxyuridine
  misc_feature (15)..(16): n is 5-[N-(1-naphthylmethyl)carboxyamide]-2'-deoxyuridine
  misc_feature (21)..(21): n is 5-[N-(1-naphthylmethyl)carboxyamide]-2'-deoxyuridine
  misc_feature (24)..(25): n is 5-[N-(1-naphthylmethyl)carboxyamide]-2'-deoxyuridine
  misc_feature (27)..(27): n is 5-[N-(1-naphthylmethyl)carboxyamide]-2'-deoxyuridine
  misc_feature (32)..(34): n is 5-[N-(1-naphthylmethyl)carboxyamide]-2'-deoxyuridine
  misc_feature (38)..(38): n is 5-[N-(1-naphthylmethyl)carboxyamide]-2'-deoxyuridine
  misc_feature (43)..(44): n is 5-[N-(1-naphthylmethyl)carboxyamide]-2'-deoxyuridine
ncctccancagccgnncaagngcnngnaggannnaaanggaannggagga

SEQ ID NO: 590 - DNA, 50 bp, Artificial Sequence
  Synthetic
  misc_feature (2)..(2): n is 1,3-propane diol
  misc_feature (8)..(8): n is 5-[N-(1-naphthylmethyl)carboxyamide]-2'-deoxyuridine
  misc_feature (15)..(16): n is 5-[N-(1-naphthylmethyl)carboxyamide]-2'-deoxyuridine
  misc_feature (21)..(21): n is 5-[N-(1-naphthylmethyl)carboxyamide]-2'-deoxyuridine
  misc_feature (24)..(25): n is 5-[N-(1-naphthylmethyl)carboxyamide]-2'-deoxyuridine
  misc_feature (27)..(27): n is 5-[N-(1-naphthylmethyl)carboxyamide]-2'-deoxyuridine
  misc_feature (32)..(34): n is 5-[N-(1-naphthylmethyl)carboxyamide]-2'-deoxyuridine
  misc_feature (38)..(38): n is 5-[N-(1-naphthylmethyl)carboxyamide]-2'-deoxyuridine
  misc_feature (43)..(44): n is 5-[N-(1-naphthylmethyl)carboxyamide]-2'-deoxyuridine
cnctccancagccgnncaagngcnngnaggannnaaanggaannggagga

SEQ ID NO: 591 - DNA, 50 bp, Artificial Sequence
  Synthetic
  misc_feature (3)..(3): n is 1,3-propane diol
  misc_feature (8)..(8): n is 5-[N-(1-naphthylmethyl)carboxyamide]-2'-deoxyuridine
  misc_feature (15)..(16): n is 5-[N-(1-naphthylmethyl)carboxyamide]-2'-deoxyuridine
  misc_feature (21)..(21): n is 5-[N-(1-naphthylmethyl)carboxyamide]-2'-deoxyuridine
  misc_feature (24)..(25): n is 5-[N-(1-naphthylmethyl)carboxyamide]-2'-deoxyuridine
  misc_feature (27)..(27): n is 5-[N-(1-naphthylmethyl)carboxyamide]-2'-deoxyuridine
  misc_feature (32)..(34): n is 5-[N-(1-naphthylmethyl)carboxyamide]-2'-deoxyuridine
  misc_feature (38)..(38): n is 5-[N-(1-naphthylmethyl)carboxyamide]-2'-deoxyuridine
  misc_feature (43)..(44): n is 5-[N-(1-naphthylmethyl)carboxyamide]-2'-deoxyuridine
ccntccancagccgnncaagngcnngnaggannnaaanggaannggagga

SEQ ID NO: 592 - DNA, 50 bp, Artificial Sequence
  Synthetic
  misc_feature (4)..(4): n is 1,3-propane diol
  misc_feature (8)..(8): n is 5-[N-(1-naphthylmethyl)carboxyamide]-2'-deoxyuridine
  misc_feature (15)..(16): n is 5-[N-(1-naphthylmethyl)carboxyamide]-2'-deoxyuridine
  misc_feature (21)..(21): n is 5-[N-(1-naphthylmethyl)carboxyamide]-2'-deoxyuridine
  misc_feature (24)..(25): n is 5-[N-(1-naphthylmethyl)carboxyamide]-2'-deoxyuridine
  misc_feature (27)..(27): n is 5-[N-(1-naphthylmethyl)carboxyamide]-2'-deoxyuridine
  misc_feature (32)..(34): n is 5-[N-(1-naphthylmethyl)carboxyamide]-2'-deoxyuridine
  misc_feature (38)..(38): n is 5-[N-(1-naphthylmethyl)carboxyamide]-2'-deoxyuridine
  misc_feature (43)..(44): n is 5-[N-(1-naphthylmethyl)carboxyamide]-2'-deoxyuridine
cccnccancagccgnncaagngcnngnaggannnaaanggaannggagga

SEQ ID NO: 593 - DNA, 50 bp, Artificial Sequence
  Synthetic
  misc_feature (5)..(5): n is 1,3-propane diol
  misc_feature (8)..(8): n is 5-[N-(1-naphthylmethyl)carboxyamide]-2'-deoxyuridine
  misc_feature (15)..(16): n is 5-[N-(1-naphthylmethyl)carboxyamide]-2'-deoxyuridine
  misc_feature (21)..(21): n is 5-[N-(1-naphthylmethyl)carboxyamide]-2'-deoxyuridine
  misc_feature (24)..(25): n is 5-[N-(1-naphthylmethyl)carboxyamide]-2'-deoxyuridine
  misc_feature (27)..(27): n is 5-[N-(1-naphthylmethyl)carboxyamide]-2'-deoxyuridine
  misc_feature (32)..(34): n is 5-[N-(1-naphthylmethyl)carboxyamide]-2'-deoxyuridine
  misc_feature (38)..(38): n is 5-[N-(1-naphthylmethyl)carboxyamide]-2'-deoxyuridine
  misc_feature (43)..(44): n is 5-[N-(1-naphthylmethyl)carboxyamide]-2'-deoxyuridine
ccctncancagccgnncaagngcnngnaggannnaaanggaannggagga

SEQ ID NO: 594 - DNA, 50 bp, Artificial Sequence
  Synthetic
  misc_feature (6)..(6): n is 1,3-propane diol
  misc_feature (8)..(8): n is 5-[N-(1-naphthylmethyl)carboxyamide]-2'-deoxyuridine
  misc_feature (15)..(16): n is 5-[N-(1-naphthylmethyl)carboxyamide]-2'-deoxyuridine
  misc_feature (21)..(21): n is 5-[N-(1-naphthylmethyl)carboxyamide]-2'-deoxyuridine
  misc_feature (24)..(25): n is 5-[N-(1-naphthylmethyl)carboxyamide]-2'-deoxyuridine
  misc_feature (27)..(27): n is 5-[N-(1-naphthylmethyl)carboxyamide]-2'-deoxyuridine
  misc_feature (32)..(34): n is 5-[N-(1-naphthylmethyl)carboxyamide]-2'-deoxyuridine
  misc_feature (38)..(38): n is 5-[N-(1-naphthylmethyl)carboxyamide]-2'-deoxyuridine
  misc_feature (43)..(44): n is 5-[N-(1-naphthylmethyl)carboxyamide]-2'-deoxyuridine
ccctcnancagccgnncaagngcnngnaggannnaaanggaannggagga

SEQ ID NO: 595 - DNA, 50 bp, Artificial Sequence
  Synthetic
  misc_feature (7)..(7): n is 1,3-propane diol
  misc_feature (8)..(8): n is 5-[N-(1-naphthylmethyl)carboxyamide]-2'-deoxyuridine
  misc_feature (15)..(16): n is 5-[N-(1-naphthylmethyl)carboxyamide]-2'-deoxyuridine
  misc_feature (21)..(21): n is 5-[N-(1-naphthylmethyl)carboxyamide]-2'-deoxyuridine
  misc_feature (24)..(25): n is 5-[N-(1-naphthylmethyl)carboxyamide]-2'-deoxyuridine
  misc_feature (27)..(27): n is 5-[N-(1-naphthylmethyl)carboxyamide]-2'-deoxyuridine
  misc_feature (32)..(34): n is 5-[N-(1-naphthylmethyl)carboxyamide]-2'-deoxyuridine
  misc_feature (38)..(38): n is 5-[N-(1-naphthylmethyl)carboxyamide]-2'-deoxyuridine
  misc_feature (43)..(44): n is 5-[N-(1-naphthylmethyl)carboxyamide]-2'-deoxyuridine
ccctccnncagccgnncaagngcnngnaggannnaaanggaannggagga

SEQ ID NO: 596 - DNA, 50 bp, Artificial Sequence; identical to SEQ ID NO: 588
  Synthetic
  misc_feature (8)..(8): n is 1,3-propane diol
  misc_feature (15)..(16): n is 5-[N-(1-naphthylmethyl)carboxyamide]-2'-deoxyuridine
  misc_feature (21)..(21): n is 5-[N-(1-naphthylmethyl)carboxyamide]-2'-deoxyuridine
  misc_feature (24)..(25): n is 5-[N-(1-naphthylmethyl)carboxyamide]-2'-deoxyuridine
  misc_feature (27)..(27): n is 5-[N-(1-naphthylmethyl)carboxyamide]-2'-deoxyuridine
  misc_feature (32)..(34): n is 5-[N-(1-naphthylmethyl)carboxyamide]-2'-deoxyuridine
  misc_feature (38)..(38): n is 5-[N-(1-naphthylmethyl)carboxyamide]-2'-deoxyuridine
  misc_feature (43)..(44): n is 5-[N-(1-naphthylmethyl)carboxyamide]-2'-deoxyuridine

SEQ ID NO: 597 - DNA, 50 bp, Artificial Sequence
  Synthetic
  misc_feature (8)..(8): n is 5-[N-(1-naphthylmethyl)carboxyamide]-2'-deoxyuridine
  misc_feature (9)..(9): n is 1,3-propane diol
  misc_feature (15)..(16): n is 5-[N-(1-naphthylmethyl)carboxyamide]-2'-deoxyuridine
  misc_feature (21)..(21): n is 5-[N-(1-naphthylmethyl)carboxyamide]-2'-deoxyuridine
  misc_feature (24)..(25): n is 5-[N-(1-naphthylmethyl)carboxyamide]-2'-deoxyuridine
  misc_feature (27)..(27): n is 5-[N-(1-naphthylmethyl)carboxyamide]-2'-deoxyuridine
  misc_feature (32)..(34): n is 5-[N-(1-naphthylmethyl)carboxyamide]-2'-deoxyuridine
  misc_feature (38)..(38): n is 5-[N-(1-naphthylmethyl)carboxyamide]-2'-deoxyuridine
  misc_feature (43)..(44): n is 5-[N-(1-naphthylmethyl)carboxyamide]-2'-deoxyuridine
ccctccannagccgnncaagngcnngnaggannnaaanggaannggagga

SEQ ID NO: 598 - DNA, 50 bp, Artificial Sequence
  Synthetic
  misc_feature (8)..(8): n is 5-[N-(1-naphthylmethyl)carboxyamide]-2'-deoxyuridine
  misc_feature (10)..(10): n is 1,3-propane diol
  misc_feature (15)..(16): n is 5-[N-(1-naphthylmethyl)carboxyamide]-2'-deoxyuridine
  misc_feature (21)..(21): n is 5-[N-(1-naphthylmethyl)carboxyamide]-2'-deoxyuridine
  misc_feature (24)..(25): n is 5-[N-(1-naphthylmethyl)carboxyamide]-2'-deoxyuridine
  misc_feature (27)..(27): n is 5-[N-(1-naphthylmethyl)carboxyamide]-2'-deoxyuridine
  misc_feature (32)..(34): n is 5-[N-(1-naphthylmethyl)carboxyamide]-2'-deoxyuridine
  misc_feature (38)..(38): n is 5-[N-(1-naphthylmethyl)carboxyamide]-2'-deoxyuridine
  misc_feature (43)..(44): n is 5-[N-(1-naphthylmethyl)carboxyamide]-2'-deoxyuridine
ccctccancngccgnncaagngcnngnaggannnaaanggaannggagga

SEQ ID NO: 599 - DNA, 50 bp, Artificial Sequence
  Synthetic
  misc_feature (8)..(8): n is 5-[N-(1-naphthylmethyl)carboxyamide]-2'-deoxyuridine
  misc_feature (11)..(11): n is 1,3-propane diol
  misc_feature (15)..(16): n is 5-[N-(1-naphthylmethyl)carboxyamide]-2'-deoxyuridine
  misc_feature (21)..(21): n is 5-[N-(1-naphthylmethyl)carboxyamide]-2'-deoxyuridine
  misc_feature (24)..(25): n is 5-[N-(1-naphthylmethyl)carboxyamide]-2'-deoxyuridine
  misc_feature (27)..(27): n is 5-[N-(1-naphthylmethyl)carboxyamide]-2'-deoxyuridine
  misc_feature (32)..(34): n is 5-[N-(1-naphthylmethyl)carboxyamide]-2'-deoxyuridine
  misc_feature (38)..(38): n is 5-[N-(1-naphthylmethyl)carboxyamide]-2'-deoxyuridine
  misc_feature (43)..(44): n is 5-[N-(1-naphthylmethyl)carboxyamide]-2'-deoxyuridine
ccctccancanccgnncaagngcnngnaggannnaaanggaannggagga

SEQ ID NO: 600 - DNA, 50 bp, Artificial Sequence
  Synthetic
  misc_feature (8)..(8): n is 5-[N-(1-naphthylmethyl)carboxyamide]-2'-deoxyuridine
  misc_feature (12)..(12): n is 1,3-propane diol
  misc_feature (15)..(16): n is 5-[N-(1-naphthylmethyl)carboxyamide]-2'-deoxyuridine
  misc_feature (21)..(21): n is 5-[N-(1-naphthylmethyl)carboxyamide]-2'-deoxyuridine
  misc_feature (24)..(25): n is 5-[N-(1-naphthylmethyl)carboxyamide]-2'-deoxyuridine
  misc_feature (27)..(27): n is 5-[N-(1-naphthylmethyl)carboxyamide]-2'-deoxyuridine
  misc_feature (32)..(34): n is 5-[N-(1-naphthylmethyl)carboxyamide]-2'-deoxyuridine
  misc_feature (38)..(38): n is 5-[N-(1-naphthylmethyl)carboxyamide]-2'-deoxyuridine
  misc_feature (43)..(44): n is 5-[N-(1-naphthylmethyl)carboxyamide]-2'-deoxyuridine
ccctccancagncgnncaagngcnngnaggannnaaanggaannggagga

SEQ ID NO: 601 - DNA, 50 bp, Artificial Sequence
  Synthetic
  misc_feature (8)..(8): n is 5-[N-(1-naphthylmethyl)carboxyamide]-2'-deoxyuridine
  misc_feature (13)..(13): n is 1,3-propane diol
  misc_feature (15)..(16): n is 5-[N-(1-naphthylmethyl)carboxyamide]-2'-deoxyuridine
  misc_feature (21)..(21): n is 5-[N-(1-naphthylmethyl)carboxyamide]-2'-deoxyuridine
  misc_feature (24)..(25): n is 5-[N-(1-naphthylmethyl)carboxyamide]-2'-deoxyuridine
  misc_feature (27)..(27): n is 5-[N-(1-naphthylmethyl)carboxyamide]-2'-deoxyuridine
  misc_feature (32)..(34): n is 5-[N-(1-naphthylmethyl)carboxyamide]-2'-deoxyuridine
  misc_feature (38)..(38): n is 5-[N-(1-naphthylmethyl)carboxyamide]-2'-deoxyuridine
  misc_feature (43)..(44): n is 5-[N-(1-naphthylmethyl)carboxyamide]-2'-deoxyuridine
ccctccancagcngnncaagngcnngnaggannnaaanggaannggagga

SEQ ID NO: 602 - DNA, 50 bp, Artificial Sequence
  Synthetic
  misc_feature (8)..(8): n is 5-[N-(1-naphthylmethyl)carboxyamide]-2'-deoxyuridine
  misc_feature (14)..(14): n is 1,3-propane diol
  misc_feature (15)..(16): n is 5-[N-(1-naphthylmethyl)carboxyamide]-2'-deoxyuridine
  misc_feature (21)..(21): n is 5-[N-(1-naphthylmethyl)carboxyamide]-2'-deoxyuridine
  misc_feature (24)..(25): n is 5-[N-(1-naphthylmethyl)carboxyamide]-2'-deoxyuridine
  misc_feature (27)..(27): n is 5-[N-(1-naphthylmethyl)carboxyamide]-2'-deoxyuridine
  misc_feature (32)..(34): n is 5-[N-(1-naphthylmethyl)carboxyamide]-2'-deoxyuridine
  misc_feature (38)..(38): n is 5-[N-(1-naphthylmethyl)carboxyamide]-2'-deoxyuridine
  misc_feature (43)..(44): n is 5-[N-(1-naphthylmethyl)carboxyamide]-2'-deoxyuridine
ccctccancagccnnncaagngcnngnaggannnaaanggaannggagga

SEQ ID NO: 603 - DNA, 50 bp, Artificial Sequence; identical to SEQ ID NO: 588
  Synthetic
  misc_feature (8)..(8): n is 5-[N-(1-naphthylmethyl)carboxyamide]-2'-deoxyuridine
  misc_feature (15)..(15): n is 1,3-propane diol
  misc_feature (16)..(16): n is 5-[N-(1-naphthylmethyl)carboxyamide]-2'-deoxyuridine
  misc_feature (21)..(21): n is 5-[N-(1-naphthylmethyl)carboxyamide]-2'-deoxyuridine
  misc_feature (24)..(25): n is 5-[N-(1-naphthylmethyl)carboxyamide]-2'-deoxyuridine
  misc_feature (27)..(27): n is 5-[N-(1-naphthylmethyl)carboxyamide]-2'-deoxyuridine
  misc_feature (32)..(34): n is 5-[N-(1-naphthylmethyl)carboxyamide]-2'-deoxyuridine
  misc_feature (38)..(38): n is 5-[N-(1-naphthylmethyl)carboxyamide]-2'-deoxyuridine
  misc_feature (43)..(44): n is 5-[N-(1-naphthylmethyl)carboxyamide]-2'-deoxyuridine

SEQ ID NO: 604 - DNA, 50 bp, Artificial Sequence; identical to SEQ ID NO: 588
  Synthetic
  misc_feature (8)..(8): n is 5-[N-(1-naphthylmethyl)carboxyamide]-2'-deoxyuridine
  misc_feature (15)..(15): n is 5-[N-(1-naphthylmethyl)carboxyamide]-2'-deoxyuridine
  misc_feature (16)..(16): n is 1,3-propane diol
  misc_feature (21)..(21): n is 5-[N-(1-naphthylmethyl)carboxyamide]-2'-deoxyuridine
  misc_feature (24)..(25): n is 5-[N-(1-naphthylmethyl)carboxyamide]-2'-deoxyuridine
  misc_feature (27)..(27): n is 5-[N-(1-naphthylmethyl)carboxyamide]-2'-deoxyuridine
  misc_feature (32)..(34): n is 5-[N-(1-naphthylmethyl)carboxyamide]-2'-deoxyuridine
  misc_feature (38)..(38): n is 5-[N-(1-naphthylmethyl)carboxyamide]-2'-deoxyuridine
  misc_feature (43)..(44): n is 5-[N-(1-naphthylmethyl)carboxyamide]-2'-deoxyuridine

SEQ ID NO: 605 - DNA, 50 bp, Artificial Sequence
  Synthetic
  misc_feature (8)..(8): n is 5-[N-(1-naphthylmethyl)carboxyamide]-2'-deoxyuridine
  misc_feature (15)..(16): n is 5-[N-(1-naphthylmethyl)carboxyamide]-2'-deoxyuridine
  misc_feature (17)..(17): n is 1,3-propane diol
  misc_feature (21)..(21): n is 5-[N-(1-naphthylmethyl)carboxyamide]-2'-deoxyuridine
  misc_feature (24)..(25): n is 5-[N-(1-naphthylmethyl)carboxyamide]-2'-deoxyuridine
  misc_feature (27)..(27): n is 5-[N-(1-naphthylmethyl)carboxyamide]-2'-deoxyuridine
  misc_feature (32)..(34): n is 5-[N-(1-naphthylmethyl)carboxyamide]-2'-deoxyuridine
  misc_feature (38)..(38): n is 5-[N-(1-naphthylmethyl)carboxyamide]-2'-deoxyuridine
  misc_feature (43)..(44): n is 5-[N-(1-naphthylmethyl)carboxyamide]-2'-deoxyuridine
ccctccancagccgnnnaagngcnngnaggannnaaanggaannggagga

SEQ ID NO: 606 - DNA, 50 bp, Artificial Sequence
  Synthetic
  misc_feature (8)..(8): n is 5-[N-(1-naphthylmethyl)carboxyamide]-2'-deoxyuridine
  misc_feature (15)..(16): n is 5-[N-(1-naphthylmethyl)carboxyamide]-2'-deoxyuridine
  misc_feature (18)..(18): n is 1,3-propane diol
  misc_feature (21)..(21): n is 5-[N-(1-naphthylmethyl)carboxyamide]-2'-deoxyuridine
  misc_feature (24)..(25): n is 5-[N-(1-naphthylmethyl)carboxyamide]-2'-deoxyuridine
  misc_feature (27)..(27): n is 5-[N-(1-naphthylmethyl)carboxyamide]-2'-deoxyuridine
  misc_feature (32)..(34): n is 5-[N-(1-naphthylmethyl)carboxyamide]-2'-deoxyuridine
  misc_feature (38)..(38): n is 5-[N-(1-naphthylmethyl)carboxyamide]-2'-deoxyuridine
  misc_feature (43)..(44): n is 5-[N-(1-naphthylmethyl)carboxyamide]-2'-deoxyuridine
ccctccancagccgnncnagngcnngnaggannnaaanggaannggagga

SEQ ID NO: 607 - DNA, 50 bp, Artificial Sequence
  Synthetic
  misc_feature (8)..(8): n is 5-[N-(1-naphthylmethyl)carboxyamide]-2'-deoxyuridine
  misc_feature (15)..(16): n is 5-[N-(1-naphthylmethyl)carboxyamide]-2'-deoxyuridine
  misc_feature (19)..(19): n is 1,3-propane diol
  misc_feature (21)..(21): n is 5-[N-(1-naphthylmethyl)carboxyamide]-2'-deoxyuridine
  misc_feature (24)..(25): n is 5-[N-(1-naphthylmethyl)carboxyamide]-2'-deoxyuridine
  misc_feature (27)..(27): n is 5-[N-(1-naphthylmethyl)carboxyamide]-2'-deoxyuridine
  misc_feature (32)..(34): n is 5-[N-(1-naphthylmethyl)carboxyamide]-2'-deoxyuridine
  misc_feature (38)..(38): n is 5-[N-(1-naphthylmethyl)carboxyamide]-2'-deoxyuridine
  misc_feature (43)..(44): n is 5-[N-(1-naphthylmethyl)carboxyamide]-2'-deoxyuridine
ccctccancagccgnncangngcnngnaggannnaaanggaannggagga

SEQ ID NO: 608 - DNA, 50 bp, Artificial Sequence
  Synthetic
  misc_feature (8)..(8): n is 5-[N-(1-naphthylmethyl)carboxyamide]-2'-deoxyuridine
  misc_feature (15)..(16): n is 5-[N-(1-naphthylmethyl)carboxyamide]-2'-deoxyuridine
  misc_feature (20)..(20): n is 1,3-propane diol
  misc_feature (21)..(21): n is 5-[N-(1-naphthylmethyl)carboxyamide]-2'-deoxyuridine
  misc_feature (24)..(25): n is 5-[N-(1-naphthylmethyl)carboxyamide]-2'-deoxyuridine
  misc_feature (27)..(27): n is 5-[N-(1-naphthylmethyl)carboxyamide]-2'-deoxyuridine
  misc_feature (32)..(34): n is 5-[N-(1-naphthylmethyl)carboxyamide]-2'-deoxyuridine
  misc_feature (38)..(38): n is 5-[N-(1-naphthylmethyl)carboxyamide]-2'-deoxyuridine
  misc_feature (43)..(44): n is 5-[N-(1-naphthylmethyl)carboxyamide]-2'-deoxyuridine
ccctccancagccgnncaanngcnngnaggannnaaanggaannggagga

SEQ ID NO: 609 - DNA, 50 bp, Artificial Sequence; identical to SEQ ID NO: 588
  Synthetic
  misc_feature (8)..(8): n is 5-[N-(1-naphthylmethyl)carboxyamide]-2'-deoxyuridine
  misc_feature (15)..(16): n is 5-[N-(1-naphthylmethyl)carboxyamide]-2'-deoxyuridine
  misc_feature (21)..(21): n is 1,3-propane diol
  misc_feature (24)..(25): n is 5-[N-(1-naphthylmethyl)carboxyamide]-2'-deoxyuridine
  misc_feature (27)..(27): n is 5-[N-(1-naphthylmethyl)carboxyamide]-2'-deoxyuridine
  misc_feature (32)..(34): n is 5-[N-(1-naphthylmethyl)carboxyamide]-2'-deoxyuridine
  misc_feature (38)..(38): n is 5-[N-(1-naphthylmethyl)carboxyamide]-2'-deoxyuridine
  misc_feature (43)..(44): n is 5-[N-(1-naphthylmethyl)carboxyamide]-2'-deoxyuridine

SEQ ID NO: 610 - DNA, 50 bp, Artificial Sequence
  Synthetic
  misc_feature (8)..(8): n is 5-[N-(1-naphthylmethyl)carboxyamide]-2'-deoxyuridine
  misc_feature (15)..(16): n is 5-[N-(1-naphthylmethyl)carboxyamide]-2'-deoxyuridine
  misc_feature (21)..(21): n is 5-[N-(1-naphthylmethyl)carboxyamide]-2'-deoxyuridine
  misc_feature (22)..(22): n is 1,3-propane diol
  misc_feature (24)..(25): n is 5-[N-(1-naphthylmethyl)carboxyamide]-2'-deoxyuridine
  misc_feature (27)..(27): n is 5-[N-(1-naphthylmethyl)carboxyamide]-2'-deoxyuridine
  misc_feature (32)..(34): n is 5-[N-(1-naphthylmethyl)carboxyamide]-2'-deoxyuridine
  misc_feature (38)..(38): n is 5-[N-(1-naphthylmethyl)carboxyamide]-2'-deoxyuridine
  misc_feature (43)..(44): n is 5-[N-(1-naphthylmethyl)carboxyamide]-2'-deoxyuridine
ccctccancagccgnncaagnncnngnaggannnaaanggaannggagga

SEQ ID NO: 611 - DNA, 50 bp, Artificial Sequence
  Synthetic
  misc_feature (8)..(8): n is 5-[N-(1-naphthylmethyl)carboxyamide]-2'-deoxyuridine
  misc_feature (15)..(16): n is 5-[N-(1-naphthylmethyl)carboxyamide]-2'-deoxyuridine
  misc_feature (21)..(21): n is 5-[N-(1-naphthylmethyl)carboxyamide]-2'-deoxyuridine
  misc_feature (23)..(23): n is 1,3-propane diol
  misc_feature (24)..(25): n is 5-[N-(1-naphthylmethyl)carboxyamide]-2'-deoxyuridine
  misc_feature (27)..(27): n is 5-[N-(1-naphthylmethyl)carboxyamide]-2'-deoxyuridine
  misc_feature (32)..(34): n is 5-[N-(1-naphthylmethyl)carboxyamide]-2'-deoxyuridine
  misc_feature (38)..(38): n is 5-[N-(1-naphthylmethyl)carboxyamide]-2'-deoxyuridine
  misc_feature (43)..(44): n is 5-[N-(1-naphthylmethyl)carboxyamide]-2'-deoxyuridine
ccctccancagccgnncaagngnnngnaggannnaaanggaannggagga

SEQ ID NO: 612 - DNA, 50 bp, Artificial Sequence; identical to SEQ ID NO: 588
  Synthetic
  misc_feature (8)..(8): n is 5-[N-(1-naphthylmethyl)carboxyamide]-2'-deoxyuridine
  misc_feature (15)..(16): n is 5-[N-(1-naphthylmethyl)carboxyamide]-2'-deoxyuridine
  misc_feature (21)..(21): n is 5-[N-(1-naphthylmethyl)carboxyamide]-2'-deoxyuridine
  misc_feature (24)..(24): n is 1,3-propane diol
  misc_feature (25)..(25): n is 5-[N-(1-naphthylmethyl)carboxyamide]-2'-deoxyuridine
  misc_feature (27)..(27): n is 5-[N-(1-naphthylmethyl)carboxyamide]-2'-deoxyuridine
  misc_feature (32)..(34): n is 5-[N-(1-naphthylmethyl)carboxyamide]-2'-deoxyuridine
  misc_feature (38)..(38): n is 5-[N-(1-naphthylmethyl)carboxyamide]-2'-deoxyuridine
  misc_feature (43)..(44): n is 5-[N-(1-naphthylmethyl)carboxyamide]-2'-deoxyuridine

SEQ ID NO: 613 - DNA, 50 bp, Artificial Sequence; identical to SEQ ID NO: 588
  Synthetic
  misc_feature (8)..(8): n is 5-[N-(1-naphthylmethyl)carboxyamide]-2'-deoxyuridine
  misc_feature (15)..(16): n is 5-[N-(1-naphthylmethyl)carboxyamide]-2'-deoxyuridine
  misc_feature (21)..(21): n is 5-[N-(1-naphthylmethyl)carboxyamide]-2'-deoxyuridine
  misc_feature (24)..(24): n is 5-[N-(1-naphthylmethyl)carboxyamide]-2'-deoxyuridine
  misc_feature (25)..(25): n is 1,3-propane diol
  misc_feature (27)..(27): n is 5-[N-(1-naphthylmethyl)carboxyamide]-2'-deoxyuridine
  misc_feature (32)..(34): n is 5-[N-(1-naphthylmethyl)carboxyamide]-2'-deoxyuridine
  misc_feature (38)..(38): n is 5-[N-(1-naphthylmethyl)carboxyamide]-2'-deoxyuridine
  misc_feature (43)..(44): n is 5-[N-(1-naphthylmethyl)carboxyamide]-2'-deoxyuridine

SEQ ID NO: 614 - DNA, 50 bp, Artificial Sequence
  Synthetic
  misc_feature (8)..(8): n is 5-[N-(1-naphthylmethyl)carboxyamide]-2'-deoxyuridine
  misc_feature (15)..(16): n is 5-[N-(1-naphthylmethyl)carboxyamide]-2'-deoxyuridine
  misc_feature (21)..(21): n is 5-[N-(1-naphthylmethyl)carboxyamide]-2'-deoxyuridine
  misc_feature (24)..(25): n is 5-[N-(1-naphthylmethyl)carboxyamide]-2'-deoxyuridine
  misc_feature (26)..(26): n is 1,3-propane diol
  misc_feature (27)..(27): n is 5-[N-(1-naphthylmethyl)carboxyamide]-2'-deoxyuridine
  misc_feature (32)..(34): n is 5-[N-(1-naphthylmethyl)carboxyamide]-2'-deoxyuridine
  misc_feature (38)..(38): n is 5-[N-(1-naphthylmethyl)carboxyamide]-2'-deoxyuridine
  misc_feature (43)..(44): n is 5-[N-(1-naphthylmethyl)carboxyamide]-2'-deoxyuridine
ccctccancagccgnncaagngcnnnnaggannnaaanggaannggagga

SEQ ID NO: 615 - DNA, 50 bp, Artificial Sequence; identical to SEQ ID NO: 588
  Synthetic
  misc_feature (8)..(8): n is 5-[N-(1-naphthylmethyl)carboxyamide]-2'-deoxyuridine
  misc_feature (15)..(16): n is 5-[N-(1-naphthylmethyl)carboxyamide]-2'-deoxyuridine
  misc_feature (21)..(21): n is 5-[N-(1-naphthylmethyl)carboxyamide]-2'-deoxyuridine
  misc_feature (24)..(25): n is 5-[N-(1-naphthylmethyl)carboxyamide]-2'-deoxyuridine
  misc_feature (27)..(27): n is 1,3-propane diol
  misc_feature (32)..(34): n is 5-[N-(1-naphthylmethyl)carboxyamide]-2'-deoxyuridine
  misc_feature (38)..(38): n is 5-[N-(1-naphthylmethyl)carboxyamide]-2'-deoxyuridine
  misc_feature (43)..(44): n is 5-[N-(1-naphthylmethyl)carboxyamide]-2'-deoxyuridine

SEQ ID NO: 616 - DNA, 50 bp, Artificial Sequence
  Synthetic
  misc_feature (8)..(8): n is 5-[N-(1-naphthylmethyl)carboxyamide]-2'-deoxyuridine
  misc_feature (15)..(16): n is 5-[N-(1-naphthylmethyl)carboxyamide]-2'-deoxyuridine
  misc_feature (21)..(21): n is 5-[N-(1-naphthylmethyl)carboxyamide]-2'-deoxyuridine
  misc_feature (24)..(25): n is 5-[N-(1-naphthylmethyl)carboxyamide]-2'-deoxyuridine
  misc_feature (27)..(27): n is 5-[N-(1-naphthylmethyl)carboxyamide]-2'-deoxyuridine
  misc_feature (28)..(28): n is 1,3-propane diol
  misc_feature (32)..(34): n is 5-[N-(1-naphthylmethyl)carboxyamide]-2'-deoxyuridine
  misc_feature (38)..(38): n is 5-[N-(1-naphthylmethyl)carboxyamide]-2'-deoxyuridine
  misc_feature (43)..(44): n is 5-[N-(1-naphthylmethyl)carboxyamide]-2'-deoxyuridine
ccctccancagccgnncaagngcnngnnggannnaaanggaannggagga

SEQ ID NO: 617 - DNA, 50 bp, Artificial Sequence
  Synthetic
  misc_feature (8)..(8): n is 5-[N-(1-naphthylmethyl)carboxyamide]-2'-deoxyuridine
  misc_feature (15)..(16): n is 5-[N-(1-naphthylmethyl)carboxyamide]-2'-deoxyuridine
  misc_feature (21)..(21): n is 5-[N-(1-naphthylmethyl)carboxyamide]-2'-deoxyuridine
  misc_feature (24)..(25): n is 5-[N-(1-naphthylmethyl)carboxyamide]-2'-deoxyuridine
  misc_feature (27)..(27): n is 5-[N-(1-naphthylmethyl)carboxyamide]-2'-deoxyuridine
  misc_feature (29)..(29): n is 1,3-propane diol
  misc_feature (32)..(34): n is 5-[N-(1-naphthylmethyl)carboxyamide]-2'-deoxyuridine
  misc_feature (38)..(38): n is 5-[N-(1-naphthylmethyl)carboxyamide]-2'-deoxyuridine
  misc_feature (43)..(44): n is 5-[N-(1-naphthylmethyl)carboxyamide]-2'-deoxyuridine
ccctccancagccgnncaagngcnngnangannnaaanggaannggagga

SEQ ID NO: 618 - DNA, 50 bp, Artificial Sequence
  Synthetic
  misc_feature (8)..(8): n is 5-[N-(1-naphthylmethyl)carboxyamide]-2'-deoxyuridine
  misc_feature (15)..(16): n is 5-[N-(1-naphthylmethyl)carboxyamide]-2'-deoxyuridine
  misc_feature (21)..(21): n is 5-[N-(1-naphthylmethyl)carboxyamide]-2'-deoxyuridine
  misc_feature (24)..(25): n is 5-[N-(1-naphthylmethyl)carboxyamide]-2'-deoxyuridine
  misc_feature (27)..(27): n is 5-[N-(1-naphthylmethyl)carboxyamide]-2'-deoxyuridine
  misc_feature (30)..(30): n is 1,3-propane diol
  misc_feature (32)..(34): n is 5-[N-(1-naphthylmethyl)carboxyamide]-2'-deoxyuridine
  misc_feature (38)..(38): n is 5-[N-(1-naphthylmethyl)carboxyamide]-2'-deoxyuridine
  misc_feature (43)..(44): n is 5-[N-(1-naphthylmethyl)carboxyamide]-2'-deoxyuridine
ccctccancagccgnncaagngcnngnagnannnaaanggaannggagga

SEQ ID NO: 619 - DNA, 50 bp, Artificial Sequence
  Synthetic
  misc_feature (8)..(8): n is 5-[N-(1-naphthylmethyl)carboxyamide]-2'-deoxyuridine
  misc_feature (15)..(16): n is 5-[N-(1-naphthylmethyl)carboxyamide]-2'-deoxyuridine
  misc_feature (21)..(21): n is 5-[N-(1-naphthylmethyl)carboxyamide]-2'-deoxyuridine
  misc_feature (24)..(25): n is 5-[N-(1-naphthylmethyl)carboxyamide]-2'-deoxyuridine
  misc_feature (27)..(27): n is 5-[N-(1-naphthylmethyl)carboxyamide]-2'-deoxyuridine
  misc_feature (31)..(31): n is 1,3-propane diol
  misc_feature (32)..(34): n is 5-[N-(1-naphthylmethyl)carboxyamide]-2'-deoxyuridine
  misc_feature (38)..(38): n is 5-[N-(1-naphthylmethyl)carboxyamide]-2'-deoxyuridine
  misc_feature (43)..(44): n is 5-[N-(1-naphthylmethyl)carboxyamide]-2'-deoxyuridine
ccctccancagccgnncaagngcnngnaggnnnnaaanggaannggagga

SEQ ID NO: 620 - DNA, 50 bp, Artificial Sequence; identical to SEQ ID NO: 588
  Synthetic
  misc_feature (8)..(8): n is 5-[N-(1-naphthylmethyl)carboxyamide]-2'-deoxyuridine
  misc_feature (15)..(16): n is 5-[N-(1-naphthylmethyl)carboxyamide]-2'-deoxyuridine
  misc_feature (21)..(21): n is 5-[N-(1-naphthylmethyl)carboxyamide]-2'-deoxyuridine
  misc_feature (24)..(25): n is 5-[N-(1-naphthylmethyl)carboxyamide]-2'-deoxyuridine
  misc_feature (27)..(27): n is 5-[N-(1-naphthylmethyl)carboxyamide]-2'-deoxyuridine
  misc_feature (32)..(32): n is 1,3-propane diol
  misc_feature (33)..(34): n is 5-[N-(1-naphthylmethyl)carboxyamide]-2'-deoxyuridine
  misc_feature (38)..(38): n is 5-[N-(1-naphthylmethyl)carboxyamide]-2'-deoxyuridine
  misc_feature (43)..(44): n is 5-[N-(1-naphthylmethyl)carboxyamide]-2'-deoxyuridine

SEQ ID NO: 621 - DNA, 50 bp, Artificial Sequence; identical to SEQ ID NO: 588
  Synthetic
  misc_feature (8)..(8): n is 5-[N-(1-naphthylmethyl)carboxyamide]-2'-deoxyuridine
  misc_feature (15)..(16): n is 5-[N-(1-naphthylmethyl)carboxyamide]-2'-deoxyuridine
  misc_feature (21)..(21): n is 5-[N-(1-naphthylmethyl)carboxyamide]-2'-deoxyuridine
  misc_feature (24)..(25): n is 5-[N-(1-naphthylmethyl)carboxyamide]-2'-deoxyuridine
  misc_feature (27)..(27): n is 5-[N-(1-naphthylmethyl)carboxyamide]-2'-deoxyuridine
  misc_feature (32)..(32): n is 5-[N-(1-naphthylmethyl)carboxyamide]-2'-deoxyuridine
  misc_feature (33)..(33): n is 1,3-propane diol
  misc_feature (34)..(34): n is 5-[N-(1-naphthylmethyl)carboxyamide]-2'-deoxyuridine
  misc_feature (38)..(38): n is 5-[N-(1-naphthylmethyl)carboxyamide]-2'-deoxyuridine
  misc_feature (43)..(44): n is 5-[N-(1-naphthylmethyl)carboxyamide]-2'-deoxyuridine

SEQ ID NO: 622 - DNA, 50 bp, Artificial Sequence; identical to SEQ ID NO: 588
  Synthetic
  misc_feature (8)..(8): n is 5-[N-(1-naphthylmethyl)carboxyamide]-2'-deoxyuridine
  misc_feature (15)..(16): n is 5-[N-(1-naphthylmethyl)carboxyamide]-2'-deoxyuridine
  misc_feature (21)..(21): n is 5-[N-(1-naphthylmethyl)carboxyamide]-2'-deoxyuridine
  misc_feature (24)..(25): n is 5-[N-(1-naphthylmethyl)carboxyamide]-2'-deoxyuridine
  misc_feature (27)..(27): n is 5-[N-(1-naphthylmethyl)carboxyamide]-2'-deoxyuridine
  misc_feature (32)..(33): n is 5-[N-(1-naphthylmethyl)carboxyamide]-2'-deoxyuridine
  misc_feature (34)..(34): n is 1,3-propane diol
  misc_feature (38)..(38): n is 5-[N-(1-naphthylmethyl)carboxyamide]-2'-deoxyuridine
  misc_feature (43)..(44): n is 5-[N-(1-naphthylmethyl)carboxyamide]-2'-deoxyuridine

SEQ ID NO: 623 - DNA, 50 bp, Artificial Sequence
  Synthetic
  misc_feature (8)..(8): n is 5-[N-(1-naphthylmethyl)carboxyamide]-2'-deoxyuridine
  misc_feature (15)..(16): n is 5-[N-(1-naphthylmethyl)carboxyamide]-2'-deoxyuridine
  misc_feature (21)..(21): n is 5-[N-(1-naphthylmethyl)carboxyamide]-2'-deoxyuridine
  misc_feature (24)..(25): n is 5-[N-(1-naphthylmethyl)carboxyamide]-2'-deoxyuridine
  misc_feature (27)..(27): n is 5-[N-(1-naphthylmethyl)carboxyamide]-2'-deoxyuridine
  misc_feature (32)..(34): n is 5-[N-(1-naphthylmethyl)carboxyamide]-2'-deoxyuridine
  misc_feature (35)..(35): n is 1,3-propane diol
  misc_feature (38)..(38): n is 5-[N-(1-naphthylmethyl)carboxyamide]-2'-deoxyuridine
  misc_feature (43)..(44): n is 5-[N-(1-naphthylmethyl)carboxyamide]-2'-deoxyuridine
ccctccancagccgnncaagngcnngnaggannnnaanggaannggagga

SEQ ID NO: 624 - DNA, 50 bp, Artificial Sequence
  Synthetic
  misc_feature (8)..(8): n is 5-[N-(1-naphthylmethyl)carboxyamide]-2'-deoxyuridine
  misc_feature (15)..(16): n is 5-[N-(1-naphthylmethyl)carboxyamide]-2'-deoxyuridine
  misc_feature (21)..(21): n is 5-[N-(1-naphthylmethyl)carboxyamide]-2'-deoxyuridine
  misc_feature (24)..(25): n is 5-[N-(1-naphthylmethyl)carboxyamide]-2'-deoxyuridine
  misc_feature (27)..(27): n is 5-[N-(1-naphthylmethyl)carboxyamide]-2'-deoxyuridine
  misc_feature (32)..(34): n is 5-[N-(1-naphthylmethyl)carboxyamide]-2'-deoxyuridine
  misc_feature (36)..(36): n is 1,3-propane diol
  misc_feature (38)..(38): n is 5-[N-(1-naphthylmethyl)carboxyamide]-2'-deoxyuridine
  misc_feature (43)..(44): n is 5-[N-(1-naphthylmethyl)carboxyamide]-2'-deoxyuridine
ccctccancagccgnncaagngcnngnaggannnananggaannggagga

SEQ ID NO: 625 - DNA, 50 bp, Artificial Sequence
  Synthetic
  misc_feature (8)..(8): n is 5-[N-(1-naphthylmethyl)carboxyamide]-2'-deoxyuridine
  misc_feature (15)..(16): n is 5-[N-(1-naphthylmethyl)carboxyamide]-2'-deoxyuridine
  misc_feature (21)..(21): n is 5-[N-(1-naphthylmethyl)carboxyamide]-2'-deoxyuridine
  misc_feature (24)..(25): n is 5-[N-(1-naphthylmethyl)carboxyamide]-2'-deoxyuridine
  misc_feature (27)..(27): n is 5-[N-(1-naphthylmethyl)carboxyamide]-2'-deoxyuridine
  misc_feature (32)..(34): n is 5-[N-(1-naphthylmethyl)carboxyamide]-2'-deoxyuridine
  misc_feature (37)..(37): n is 1,3-propane diol
  misc_feature (38)..(38): n is 5-[N-(1-naphthylmethyl)carboxyamide]-2'-deoxyuridine
  misc_feature (43)..(44): n is 5-[N-(1-naphthylmethyl)carboxyamide]-2'-deoxyuridine
ccctccancagccgnncaagngcnngnaggannnaannggaannggagga

SEQ ID NO: 626 - DNA, 50 bp, Artificial Sequence; identical to SEQ ID NO: 588
  Synthetic
  misc_feature (8)..(8): n is 5-[N-(1-naphthylmethyl)carboxyamide]-2'-deoxyuridine
  misc_feature (15)..(16): n is 5-[N-(1-naphthylmethyl)carboxyamide]-2'-deoxyuridine
  misc_feature (21)..(21): n is 5-[N-(1-naphthylmethyl)carboxyamide]-2'-deoxyuridine
  misc_feature (24)..(25): n is 5-[N-(1-naphthylmethyl)carboxyamide]-2'-deoxyuridine
  misc_feature (27)..(27): n is 5-[N-(1-naphthylmethyl)carboxyamide]-2'-deoxyuridine
  misc_feature (32)..(34): n is 5-[N-(1-naphthylmethyl)carboxyamide]-2'-deoxyuridine
  misc_feature (38)..(38): n is 1,3-propane diol
  misc_feature (43)..(44): n is 5-[N-(1-naphthylmethyl)carboxyamide]-2'-deoxyuridine

SEQ ID NO: 627 - DNA, 50 bp, Artificial Sequence
  Synthetic
  misc_feature (8)..(8): n is 5-[N-(1-naphthylmethyl)carboxyamide]-2'-deoxyuridine
  misc_feature (15)..(16): n is 5-[N-(1-naphthylmethyl)carboxyamide]-2'-deoxyuridine
  misc_feature (21)..(21): n is 5-[N-(1-naphthylmethyl)carboxyamide]-2'-deoxyuridine
  misc_feature (24)..(25): n is 5-[N-(1-naphthylmethyl)carboxyamide]-2'-deoxyuridine
  misc_feature (27)..(27): n is 5-[N-(1-naphthylmethyl)carboxyamide]-2'-deoxyuridine
  misc_feature (32)..(34): n is 5-[N-(1-naphthylmethyl)carboxyamide]-2'-deoxyuridine
  misc_feature (38)..(38): n is 5-[N-(1-naphthylmethyl)carboxyamide]-2'-deoxyuridine
  misc_feature (39)..(39): n is 1,3-propane diol
  misc_feature (43)..(44): n is 5-[N-(1-naphthylmethyl)carboxyamide]-2'-deoxyuridine
ccctccancagccgnncaagngcnngnaggannnaaanngaannggagga

SEQ ID NO: 628 - DNA, 50 bp, Artificial Sequence
  Synthetic
  misc_feature (8)..(8): n is 5-[N-(1-naphthylmethyl)carboxyamide]-2'-deoxyuridine
  misc_feature (15)..(16): n is 5-[N-(1-naphthylmethyl)carboxyamide]-2'-deoxyuridine
  misc_feature (21)..(21): n is 5-[N-(1-naphthylmethyl)carboxyamide]-2'-deoxyuridine
  misc_feature (24)..(25): n is 5-[N-(1-naphthylmethyl)carboxyamide]-2'-deoxyuridine
  misc_feature (27)..(27): n is 5-[N-(1-naphthylmethyl)carboxyamide]-2'-deoxyuridine
  misc_feature (32)..(34): n is 5-[N-(1-naphthylmethyl)carboxyamide]-2'-deoxyuridine
  misc_feature (38)..(38): n is 5-[N-(1-naphthylmethyl)carboxyamide]-2'-deoxyuridine
  misc_feature (40)..(40): n is 1,3-propane diol
  misc_feature (43)..(44): n is 5-[N-(1-naphthylmethyl)carboxyamide]-2'-deoxyuridine
ccctccancagccgnncaagngcnngnaggannnaaangnaannggagga

SEQ ID NO: 629 - DNA, 50 bp, Artificial Sequence
  Synthetic
  misc_feature (8)..(8): n is 5-[N-(1-naphthylmethyl)carboxyamide]-2'-deoxyuridine
  misc_feature (15)..(16): n is 5-[N-(1-naphthylmethyl)carboxyamide]-2'-deoxyuridine
  misc_feature (21)..(21): n is 5-[N-(1-naphthylmethyl)carboxyamide]-2'-deoxyuridine
  misc_feature (24)..(25): n is 5-[N-(1-naphthylmethyl)carboxyamide]-2'-deoxyuridine
  misc_feature (27)..(27): n is 5-[N-(1-naphthylmethyl)carboxyamide]-2'-deoxyuridine
  misc_feature (32)..(34): n is 5-[N-(1-naphthylmethyl)carboxyamide]-2'-deoxyuridine
  misc_feature (38)..(38): n is 5-[N-(1-naphthylmethyl)carboxyamide]-2'-deoxyuridine
  misc_feature (41)..(41): n is 1,3-propane diol
  misc_feature (43)..(44): n is 5-[N-(1-naphthylmethyl)carboxyamide]-2'-deoxyuridine
ccctccancagccgnncaagngcnngnaggannnaaanggnannggagga

SEQ ID NO: 630 - DNA, 50 bp, Artificial Sequence
  Synthetic
  misc_feature (8)..(8): n is 5-[N-(1-naphthylmethyl)carboxyamide]-2'-deoxyuridine
  misc_feature (15)..(16): n is 5-[N-(1-naphthylmethyl)carboxyamide]-2'-deoxyuridine
  misc_feature (21)..(21): n is 5-[N-(1-naphthylmethyl)carboxyamide]-2'-deoxyuridine
  misc_feature (24)..(25): n is 5-[N-(1-naphthylmethyl)carboxyamide]-2'-deoxyuridine
  misc_feature (27)..(27): n is 5-[N-(1-naphthylmethyl)carboxyamide]-2'-deoxyuridine
  misc_feature (32)..(34): n is 5-[N-(1-naphthylmethyl)carboxyamide]-2'-deoxyuridine
  misc_feature (38)..(38): n is 5-[N-(1-naphthylmethyl)carboxyamide]-2'-deoxyuridine
  misc_feature (42)..(42): n is 1,3-propane diol
  misc_feature (43)..(44): n is 5-[N-(1-naphthylmethyl)carboxyamide]-2'-deoxyuridine
ccctccancagccgnncaagngcnngnaggannnaaanggannnggagga

SEQ ID NO: 631 - DNA, 50 bp, Artificial Sequence; identical to SEQ ID NO: 588
  Synthetic
  misc_feature (8)..(8): n is 5-[N-(1-naphthylmethyl)carboxyamide]-2'-deoxyuridine
  misc_feature (15)..(16): n is 5-[N-(1-naphthylmethyl)carboxyamide]-2'-deoxyuridine
  misc_feature (21)..(21): n is 5-[N-(1-naphthylmethyl)carboxyamide]-2'-deoxyuridine
  misc_feature (24)..(25): n is 5-[N-(1-naphthylmethyl)carboxyamide]-2'-deoxyuridine
  misc_feature (27)..(27): n is 5-[N-(1-naphthylmethyl)carboxyamide]-2'-deoxyuridine
  misc_feature (32)..(34): n is 5-[N-(1-naphthylmethyl)carboxyamide]-2'-deoxyuridine
  misc_feature (38)..(38): n is 5-[N-(1-naphthylmethyl)carboxyamide]-2'-deoxyuridine
  misc_feature (43)..(43): n is 1,3-propane diol
  misc_feature (44)..(44): n is 5-[N-(1-naphthylmethyl)carboxyamide]-2'-deoxyuridine

SEQ ID NO: 632 - DNA, 50 bp, Artificial Sequence; identical to SEQ ID NO: 588
  Synthetic
  misc_feature (8)..(8): n is 5-[N-(1-naphthylmethyl)carboxyamide]-2'-deoxyuridine
  misc_feature (15)..(16): n is 5-[N-(1-naphthylmethyl)carboxyamide]-2'-deoxyuridine
  misc_feature (21)..(21): n is 5-[N-(1-naphthylmethyl)carboxyamide]-2'-deoxyuridine
  misc_feature (24)..(25): n is 5-[N-(1-naphthylmethyl)carboxyamide]-2'-deoxyuridine
  misc_feature (27)..(27): n is 5-[N-(1-naphthylmethyl)carboxyamide]-2'-deoxyuridine
  misc_feature (32)..(34): n is 5-[N-(1-naphthylmethyl)carboxyamide]-2'-deoxyuridine
  misc_feature (38)..(38): n is 5-[N-(1-naphthylmethyl)carboxyamide]-2'-deoxyuridine
  misc_feature (43)..(43): n is 5-[N-(1-naphthylmethyl)carboxyamide]-2'-deoxyuridine
  misc_feature (44)..(44): n is 1,3-propane diol

SEQ ID NO: 633 - DNA, 50 bp, Artificial Sequence
  Synthetic
  misc_feature (8)..(8): n is 5-[N-(1-naphthylmethyl)carboxyamide]-2'-deoxyuridine
  misc_feature (15)..(16): n is 5-[N-(1-naphthylmethyl)carboxyamide]-2'-deoxyuridine
  misc_feature (21)..(21): n is 5-[N-(1-naphthylmethyl)carboxyamide]-2'-deoxyuridine
  misc_feature (24)..(25): n is 5-[N-(1-naphthylmethyl)carboxyamide]-2'-deoxyuridine
  misc_feature (27)..(27): n is 5-[N-(1-naphthylmethyl)carboxyamide]-2'-deoxyuridine
  misc_feature (32)..(34): n is 5-[N-(1-naphthylmethyl)carboxyamide]-2'-deoxyuridine
  misc_feature (38)..(38): n is 5-[N-(1-naphthylmethyl)carboxyamide]-2'-deoxyuridine
  misc_feature (43)..(44): n is 5-[N-(1-naphthylmethyl)carboxyamide]-2'-deoxyuridine
  misc_feature (45)..(45): n is 1,3-propane diol
ccctccancagccgnncaagngcnngnaggannnaaanggaannngagga

SEQ ID NO: 634 - DNA, 50 bp, Artificial Sequence
  Synthetic
  misc_feature (8)..(8): n is 5-[N-(1-naphthylmethyl)carboxyamide]-2'-deoxyuridine
  misc_feature (15)..(16): n is 5-[N-(1-naphthylmethyl)carboxyamide]-2'-deoxyuridine
  misc_feature (21)..(21): n is 5-[N-(1-naphthylmethyl)carboxyamide]-2'-deoxyuridine
  misc_feature (24)..(25): n is 5-[N-(1-naphthylmethyl)carboxyamide]-2'-deoxyuridine
  misc_feature (27)..(27): n is 5-[N-(1-naphthylmethyl)carboxyamide]-2'-deoxyuridine
  misc_feature (32)..(34): n is 5-[N-(1-naphthylmethyl)carboxyamide]-2'-deoxyuridine
  misc_feature (38)..(38): n is 5-[N-(1-naphthylmethyl)carboxyamide]-2'-deoxyuridine
  misc_feature (43)..(44): n is 5-[N-(1-naphthylmethyl)carboxyamide]-2'-deoxyuridine
  misc_feature (46)..(46): n is 1,3-propane diol
ccctccancagccgnncaagngcnngnaggannnaaanggaanngnagga

SEQ ID NO: 635 - DNA, 50 bp, Artificial Sequence
  Synthetic
  misc_feature (8)..(8): n is 5-[N-(1-naphthylmethyl)carboxyamide]-2'-deoxyuridine
  misc_feature (15)..(16): n is 5-[N-(1-naphthylmethyl)carboxyamide]-2'-deoxyuridine
  misc_feature (21)..(21): n is 5-[N-(1-naphthylmethyl)carboxyamide]-2'-deoxyuridine
  misc_feature (24)..(25): n is 5-[N-(1-naphthylmethyl)carboxyamide]-2'-deoxyuridine
  misc_feature (27)..(27): n is 5-[N-(1-naphthylmethyl)carboxyamide]-2'-deoxyuridine
  misc_feature (32)..(34): n is 5-[N-(1-naphthylmethyl)carboxyamide]-2'-deoxyuridine
  misc_feature (38)..(38): n is 5-[N-(1-naphthylmethyl)carboxyamide]-2'-deoxyuridine
  misc_feature (43)..(44): n is 5-[N-(1-naphthylmethyl)carboxyamide]-2'-deoxyuridine
  misc_feature (47)..(47): n is 1,3-propane diol
ccctccancagccgnncaagngcnngnaggannnaaanggaannggngga

SEQ ID NO: 636 - DNA, 50 bp, Artificial Sequence
  Synthetic
  misc_feature (8)..(8): n is 5-[N-(1-naphthylmethyl)carboxyamide]-2'-deoxyuridine
  misc_feature (15)..(16): n is 5-[N-(1-naphthylmethyl)carboxyamide]-2'-deoxyuridine
  misc_feature (21)..(21): n is 5-[N-(1-naphthylmethyl)carboxyamide]-2'-deoxyuridine
  misc_feature (24)..(25): n is 5-[N-(1-naphthylmethyl)carboxyamide]-2'-deoxyuridine
  misc_feature (27)..(27): n is 5-[N-(1-naphthylmethyl)carboxyamide]-2'-deoxyuridine
  misc_feature (32)..(34): n is 5-[N-(1-naphthylmethyl)carboxyamide]-2'-deoxyuridine
  misc_feature (38)..(38): n is 5-[N-(1-naphthylmethyl)carboxyamide]-2'-deoxyuridine
  misc_feature (43)..(44): n is 5-[N-(1-naphthylmethyl)carboxyamide]-2'-deoxyuridine
  misc_feature (48)..(48): n is 1,3-propane diol
ccctccancagccgnncaagngcnngnaggannnaaanggaanngganga

SEQ ID NO: 637 - DNA, 50 bp, Artificial Sequence
  Synthetic
  misc_feature (8)..(8): n is 5-[N-(1-naphthylmethyl)carboxyamide]-2'-deoxyuridine
  misc_feature (15)..(16): n is 5-[N-(1-naphthylmethyl)carboxyamide]-2'-deoxyuridine
  misc_feature (21)..(21): n is 5-[N-(1-naphthylmethyl)carboxyamide]-2'-deoxyuridine
  misc_feature (24)..(25): n is 5-[N-(1-naphthylmethyl)carboxyamide]-2'-deoxyuridine
  misc_feature (27)..(27): n is 5-[N-(1-naphthylmethyl)carboxyamide]-2'-deoxyuridine
  misc_feature (32)..(34): n is 5-[N-(1-naphthylmethyl)carboxyamide]-2'-deoxyuridine
  misc_feature (38)..(38): n is 5-[N-(1-naphthylmethyl)carboxyamide]-2'-deoxyuridine
  misc_feature (43)..(44): n is 5-[N-(1-naphthylmethyl)carboxyamide]-2'-deoxyuridine
  misc_feature (49)..(49): n is 1,3-propane diol
ccctccancagccgnncaagngcnngnaggannnaaanggaannggagna

SEQ ID NO: 638 - DNA, 50 bp, Artificial Sequence
  Synthetic
  misc_feature (8)..(8): n is 5-[N-(1-naphthylmethyl)carboxyamide]-2'-deoxyuridine
  misc_feature (15)..(16): n is 5-[N-(1-naphthylmethyl)carboxyamide]-2'-deoxyuridine
  misc_feature (21)..(21): n is 5-[N-(1-naphthylmethyl)carboxyamide]-2'-deoxyuridine
  misc_feature (24)..(25): n is 5-[N-(1-naphthylmethyl)carboxyamide]-2'-deoxyuridine
  misc_feature (27)..(27): n is 5-[N-(1-naphthylmethyl)carboxyamide]-2'-deoxyuridine
  misc_feature (32)..(34): n is 5-[N-(1-naphthylmethyl)carboxyamide]-2'-deoxyuridine
  misc_feature (38)..(38): n is 5-[N-(1-naphthylmethyl)carboxyamide]-2'-deoxyuridine
  misc_feature (43)..(44): n is 5-[N-(1-naphthylmethyl)carboxyamide]-2'-deoxyuridine
  misc_feature (50)..(50): n is 1,3-propane diol
ccctccancagccgnncaagngcnngnaggannnaaanggaannggaggn

SEQ ID NO: 639 - DNA, 32 bp, Artificial Sequence
  Synthetic
  misc_feature (1)..(1): n is 2'-O-methyl-adenosine
  misc_feature (6)..(7): n is 5-[N-(1-naphthylmethyl)carboxyamide]-2'-deoxyuridine
  misc_feature (12)..(12): n is 5-[N-(1-naphthylmethyl)carboxyamide]-2'-deoxyuridine
  misc_feature (15)..(16): n is 5-[N-(1-naphthylmethyl)carboxyamide]-2'-deoxyuridine
  misc_feature (18)..(18): n is 5-[N-(1-naphthylmethyl)carboxyamide]-2'-deoxyuridine
  misc_feature (23)..(25): n is 5-[N-(1-naphthylmethyl)carboxyamide]-2'-deoxyuridine
  misc_feature (29)..(29): n is 5-[N-(1-naphthylmethyl)carboxyamide]-2'-deoxyuridine
ngccgnncaagngcnngnaggannnaaangga

SEQ ID NO: 640 - DNA, 32 bp, Artificial Sequence
  Synthetic
  misc_feature (2)..(2): n is 2'-O-methyl-guanosine
  misc_feature (6)..(7): n is 5-[N-(1-naphthylmethyl)carboxyamide]-2'-deoxyuridine
  misc_feature (12)..(12): n is 5-[N-(1-naphthylmethyl)carboxyamide]-2'-deoxyuridine
  misc_feature (15)..(16): n is 5-[N-(1-naphthylmethyl)carboxyamide]-2'-deoxyuridine
  misc_feature (18)..(18): n is 5-[N-(1-naphthylmethyl)carboxyamide]-2'-deoxyuridine
  misc_feature (23)..(25): n is 5-[N-(1-naphthylmethyl)carboxyamide]-2'-deoxyuridine
  misc_feature (29)..(29): n is 5-[N-(1-naphthylmethyl)carboxyamide]-2'-deoxyuridine
anccgnncaagngcnngnaggannnaaangga

SEQ ID NO: 641 - DNA, 32 bp, Artificial Sequence
  Synthetic
  misc_feature (3)..(3): n is 2'-O-methyl-cytidine
  misc_feature (6)..(7): n is 5-[N-(1-naphthylmethyl)carboxyamide]-2'-deoxyuridine
  misc_feature (12)..(12): n is 5-[N-(1-naphthylmethyl)carboxyamide]-2'-deoxyuridine
  misc_feature (15)..(16): n is 5-[N-(1-naphthylmethyl)carboxyamide]-2'-deoxyuridine
  misc_feature (18)..(18): n is 5-[N-(1-naphthylmethyl)carboxyamide]-2'-deoxyuridine
  misc_feature (23)..(25): n is 5-[N-(1-naphthylmethyl)carboxyamide]-2'-deoxyuridine
  misc_feature (29)..(29): n is 5-[N-(1-naphthylmethyl)carboxyamide]-2'-deoxyuridine
agncgnncaagngcnngnaggannnaaangga

SEQ ID NO: 642 - DNA, 32 bp, Artificial Sequence
  Synthetic
  misc_feature (4)..(4): n is 2'-O-methyl-cytidine
  misc_feature (6)..(7): n is 5-[N-(1-naphthylmethyl)carboxyamide]-2'-deoxyuridine
  misc_feature (12)..(12): n is 5-[N-(1-naphthylmethyl)carboxyamide]-2'-deoxyuridine
  misc_feature (15)..(16): n is 5-[N-(1-naphthylmethyl)carboxyamide]-2'-deoxyuridine
  misc_feature (18)..(18): n is 5-[N-(1-naphthylmethyl)carboxyamide]-2'-deoxyuridine
  misc_feature (23)..(25): n is 5-[N-(1-naphthylmethyl)carboxyamide]-2'-deoxyuridine
  misc_feature (29)..(29): n is 5-[N-(1-naphthylmethyl)carboxyamide]-2'-deoxyuridine
agcngnncaagngcnngnaggannnaaangga

SEQ ID NO: 643 - DNA, 32 bp, Artificial Sequence
  Synthetic
  misc_feature (5)..(5): n is 2'-O-methyl-guanosine
  misc_feature (6)..(7): n is 5-[N-(1-naphthylmethyl)carboxyamide]-2'-deoxyuridine
  misc_feature (12)..(12): n is 5-[N-(1-naphthylmethyl)carboxyamide]-2'-deoxyuridine
  misc_feature (15)..(16): n is 5-[N-(1-naphthylmethyl)carboxyamide]-2'-deoxyuridine
  misc_feature (18)..(18): n is 5-[N-(1-naphthylmethyl)carboxyamide]-2'-deoxyuridine
  misc_feature (23)..(25): n is 5-[N-(1-naphthylmethyl)carboxyamide]-2'-deoxyuridine
  misc_feature (29)..(29): n is 5-[N-(1-naphthylmethyl)carboxyamide]-2'-deoxyuridine
agccnnncaagngcnngnaggannnaaangga

SEQ ID NO: 644 - DNA, 32 bp, Artificial Sequence; identical to SEQ ID NO: 567
  Synthetic
  misc_feature (6)..(6): n is 2'-O-methyl-uridine
  misc_feature (7)..(7): n is 5-[N-(1-naphthylmethyl)carboxyamide]-2'-deoxyuridine
  misc_feature (12)..(12): n is 5-[N-(1-naphthylmethyl)carboxyamide]-2'-deoxyuridine
  misc_feature (15)..(16): n is 5-[N-(1-naphthylmethyl)carboxyamide]-2'-deoxyuridine
  misc_feature (18)..(18): n is 5-[N-(1-naphthylmethyl)carboxyamide]-2'-deoxyuridine
  misc_feature (23)..(25): n is 5-[N-(1-naphthylmethyl)carboxyamide]-2'-deoxyuridine
  misc_feature (29)..(29): n is 5-[N-(1-naphthylmethyl)carboxyamide]-2'-deoxyuridine

SEQ ID NO: 645 - DNA, 32 bp, Artificial Sequence; identical to SEQ ID NO: 567
  Synthetic
  misc_feature (6)..(6): n is 5-[N-(1-naphthylmethyl)carboxyamide]-2'-deoxyuridine
  misc_feature (7)..(7): n is 2'-O-methyl-uridine
  misc_feature (12)..(12): n is 5-[N-(1-naphthylmethyl)carboxyamide]-2'-deoxyuridine
  misc_feature (15)..(16): n is 5-[N-(1-naphthylmethyl)carboxyamide]-2'-deoxyuridine
  misc_feature (18)..(18): n is 5-[N-(1-naphthylmethyl)carboxyamide]-2'-deoxyuridine
  misc_feature (23)..(25): n is 5-[N-(1-naphthylmethyl)carboxyamide]-2'-deoxyuridine
  misc_feature (29)..(29): n is 5-[N-(1-naphthylmethyl)carboxyamide]-2'-deoxyuridine

SEQ ID NO: 646 - DNA, 32 bp, Artificial Sequence
  Synthetic
  misc_feature (6)..(7): n is 5-[N-(1-naphthylmethyl)carboxyamide]-2'-deoxyuridine
  misc_feature (8)..(8): n is 2'-O-methyl-cytidine
  misc_feature (12)..(12): n is 5-[N-(1-naphthylmethyl)carboxyamide]-2'-deoxyuridine
  misc_feature (15)..(16): n is 5-[N-(1-naphthylmethyl)carboxyamide]-2'-deoxyuridine
  misc_feature (18)..(18): n is 5-[N-(1-naphthylmethyl)carboxyamide]-2'-deoxyuridine
  misc_feature (23)..(25): n is 5-[N-(1-naphthylmethyl)carboxyamide]-2'-deoxyuridine
  misc_feature (29)..(29): n is 5-[N-(1-naphthylmethyl)carboxyamide]-2'-deoxyuridine
agccgnnnaagngcnngnaggannnaaangga

SEQ ID NO: 647 - DNA, 32 bp, Artificial Sequence
  Synthetic
  misc_feature (6)..(7): n is 5-[N-(1-naphthylmethyl)carboxyamide]-2'-deoxyuridine
  misc_feature (9)..(9): n is 2'-O-methyl-adenosine
  misc_feature (12)..(12): n is 5-[N-(1-naphthylmethyl)carboxyamide]-2'-deoxyuridine
  misc_feature (15)..(16): n is 5-[N-(1-naphthylmethyl)carboxyamide]-2'-deoxyuridine
  misc_feature (18)..(18): n is 5-[N-(1-naphthylmethyl)carboxyamide]-2'-deoxyuridine
  misc_feature (23)..(25): n is 5-[N-(1-naphthylmethyl)carboxyamide]-2'-deoxyuridine
  misc_feature (29)..(29): n is 5-[N-(1-naphthylmethyl)carboxyamide]-2'-deoxyuridine
agccgnncnagngcnngnaggannnaaangga

SEQ ID NO: 648 - DNA, 32 bp, Artificial Sequence
  Synthetic
  misc_feature (6)..(7): n is 5-[N-(1-naphthylmethyl)carboxyamide]-2'-deoxyuridine
  misc_feature (10)..(10): n is 2'-O-methyl-adenosine
  misc_feature (12)..(12): n is 5-[N-(1-naphthylmethyl)carboxyamide]-2'-deoxyuridine
  misc_feature (15)..(16): n is 5-[N-(1-naphthylmethyl)carboxyamide]-2'-deoxyuridine
  misc_feature (18)..(18): n is 5-[N-(1-naphthylmethyl)carboxyamide]-2'-deoxyuridine
  misc_feature (23)..(25): n is 5-[N-(1-naphthylmethyl)carboxyamide]-2'-deoxyuridine
  misc_feature (29)..(29): n is 5-[N-(1-naphthylmethyl)carboxyamide]-2'-deoxyuridine
agccgnncangngcnngnaggannnaaangga

SEQ ID NO: 649 - DNA, 32 bp, Artificial Sequence
  Synthetic
  misc_feature (6)..(7): n is 5-[N-(1-naphthylmethyl)carboxyamide]-2'-deoxyuridine
  misc_feature (11)..(11): n is 2'-O-methyl-guanosine
  misc_feature (12)..(12): n is 5-[N-(1-naphthylmethyl)carboxyamide]-2'-deoxyuridine
  misc_feature (15)..(16): n is 5-[N-(1-naphthylmethyl)carboxyamide]-2'-deoxyuridine
  misc_feature (18)..(18): n is 5-[N-(1-naphthylmethyl)carboxyamide]-2'-deoxyuridine
  misc_feature (23)..(25): n is 5-[N-(1-naphthylmethyl)carboxyamide]-2'-deoxyuridine
  misc_feature (29)..(29): n is 5-[N-(1-naphthylmethyl)carboxyamide]-2'-deoxyuridine
agccgnncaanngcnngnaggannnaaangga

SEQ ID NO: 650 - DNA, 32 bp, Artificial Sequence; identical to SEQ ID NO: 567
  Synthetic
  misc_feature (6)..(7): n is 5-[N-(1-naphthylmethyl)carboxyamide]-2'-deoxyuridine
  misc_feature (12)..(12): n is 2'-O-methyl-uridine
  misc_feature (15)..(16): n is 5-[N-(1-naphthylmethyl)carboxyamide]-2'-deoxyuridine
  misc_feature (18)..(18): n is 5-[N-(1-naphthylmethyl)carboxyamide]-2'-deoxyuridine
  misc_feature (23)..(25): n is 5-[N-(1-naphthylmethyl)carboxyamide]-2'-deoxyuridine
  misc_feature (29)..(29): n is 5-[N-(1-naphthylmethyl)carboxyamide]-2'-deoxyuridine

SEQ ID NO: 651 - DNA, 32 bp, Artificial Sequence
  Synthetic
  misc_feature (6)..(7): n is 5-[N-(1-naphthylmethyl)carboxyamide]-2'-deoxyuridine
  misc_feature (12)..(12): n is 5-[N-(1-naphthylmethyl)carboxyamide]-2'-deoxyuridine
  misc_feature (13)..(13): n is 2'-O-methyl-guanosine
  misc_feature (15)..(16): n is 5-[N-(1-naphthylmethyl)carboxyamide]-2'-deoxyuridine
  misc_feature (18)..(18): n is 5-[N-(1-naphthylmethyl)carboxyamide]-2'-deoxyuridine
  misc_feature (23)..(25): n is 5-[N-(1-naphthylmethyl)carboxyamide]-2'-deoxyuridine
  misc_feature (29)..(29): n is 5-[N-(1-naphthylmethyl)carboxyamide]-2'-deoxyuridine
agccgnncaagnncnngnaggannnaaangga

SEQ ID NO: 652 - DNA, 32 bp, Artificial Sequence
  Synthetic
  misc_feature (6)..(7): n is 5-[N-(1-naphthylmethyl)carboxyamide]-2'-deoxyuridine
  misc_feature (12)..(12): n is 5-[N-(1-naphthylmethyl)carboxyamide]-2'-deoxyuridine
  misc_feature (14)..(14): n is 2'-O-methyl-cytidine
  misc_feature (15)..(16): n is 5-[N-(1-naphthylmethyl)carboxyamide]-2'-deoxyuridine
  misc_feature (18)..(18): n is 5-[N-(1-naphthylmethyl)carboxyamide]-2'-deoxyuridine
  misc_feature (23)..(25): n is 5-[N-(1-naphthylmethyl)carboxyamide]-2'-deoxyuridine
  misc_feature (29)..(29): n is 5-[N-(1-naphthylmethyl)carboxyamide]-2'-deoxyuridine
agccgnncaagngnnngnaggannnaaangga

SEQ ID NO: 653 - DNA, 32 bp, Artificial Sequence; identical to SEQ ID NO: 567
  Synthetic
  misc_feature (6)..(7): n is 5-[N-(1-naphthylmethyl)carboxyamide]-2'-deoxyuridine
  misc_feature (12)..(12): n is 5-[N-(1-naphthylmethyl)carboxyamide]-2'-deoxyuridine
  misc_feature (15)..(15): n is 2'-O-methyl-uridine
  misc_feature (16)..(16): n is 5-[N-(1-naphthylmethyl)carboxyamide]-2'-deoxyuridine
  misc_feature (18)..(18): n is 5-[N-(1-naphthylmethyl)carboxyamide]-2'-deoxyuridine
  misc_feature (23)..(25): n is 5-[N-(1-naphthylmethyl)carboxyamide]-2'-deoxyuridine
  misc_feature (29)..(29): n is 5-[N-(1-naphthylmethyl)carboxyamide]-2'-deoxyuridine

SEQ ID NO: 654 - DNA, 32 bp, Artificial Sequence; identical to SEQ ID NO: 567
  Synthetic
  misc_feature (6)..(7): n is 5-[N-(1-naphthylmethyl)carboxyamide]-2'-deoxyuridine
  misc_feature (12)..(12): n is 5-[N-(1-naphthylmethyl)carboxyamide]-2'-deoxyuridine
  misc_feature (15)..(15): n is 5-[N-(1-naphthylmethyl)carboxyamide]-2'-deoxyuridine
  misc_feature (16)..(16): n is 2'-O-methyl-uridine
  misc_feature (18)..(18): n is 5-[N-(1-naphthylmethyl)carboxyamide]-2'-deoxyuridine
  misc_feature (23)..(25): n is 5-[N-(1-naphthylmethyl)carboxyamide]-2'-deoxyuridine
  misc_feature (29)..(29): n is 5-[N-(1-naphthylmethyl)carboxyamide]-2'-deoxyuridine

SEQ ID NO: 655 - DNA, 32 bp, Artificial Sequence
  Synthetic
  misc_feature (6)..(7): n is 5-[N-(1-naphthylmethyl)carboxyamide]-2'-deoxyuridine
  misc_feature (12)..(12): n is 5-[N-(1-naphthylmethyl)carboxyamide]-2'-deoxyuridine
  misc_feature (15)..(16): n is 5-[N-(1-naphthylmethyl)carboxyamide]-2'-deoxyuridine
  misc_feature (17)..(17): n is 2'-O-methyl-guanosine
  misc_feature (18)..(18): n is 5-[N-(1-naphthylmethyl)carboxyamide]-2'-deoxyuridine
  misc_feature (23)..(25): n is 5-[N-(1-naphthylmethyl)carboxyamide]-2'-deoxyuridine
  misc_feature (29)..(29): n is 5-[N-(1-naphthylmethyl)carboxyamide]-2'-deoxyuridine
agccgnncaagngcnnnnaggannnaaangga

SEQ ID NO: 656 - DNA, 32 bp, Artificial Sequence; identical to SEQ ID NO: 567
  Synthetic
  misc_feature (6)..(7): n is 5-[N-(1-naphthylmethyl)carboxyamide]-2'-deoxyuridine
  misc_feature (12)..(12): n is 5-[N-(1-naphthylmethyl)carboxyamide]-2'-deoxyuridine
  misc_feature (15)..(16): n is 5-[N-(1-naphthylmethyl)carboxyamide]-2'-deoxyuridine
  misc_feature (18)..(18): n is 2'-O-methyl-uridine
  misc_feature (23)..(25): n is 5-[N-(1-naphthylmethyl)carboxyamide]-2'-deoxyuridine
  misc_feature (29)..(29): n is 5-[N-(1-naphthylmethyl)carboxyamide]-2'-deoxyuridine

SEQ ID NO: 657 - DNA, 32 bp, Artificial Sequence
  Synthetic
  misc_feature (6)..(7): n is 5-[N-(1-naphthylmethyl)carboxyamide]-2'-deoxyuridine
  misc_feature (12)..(12): n is 5-[N-(1-naphthylmethyl)carboxyamide]-2'-deoxyuridine
  misc_feature (15)..(16): n is 5-[N-(1-naphthylmethyl)carboxyamide]-2'-deoxyuridine
  misc_feature (18)..(18): n is 5-[N-(1-naphthylmethyl)carboxyamide]-2'-deoxyuridine
  misc_feature (19)..(19): n is 2'-O-methyl-adenosine
  misc_feature (23)..(25): n is 5-[N-(1-naphthylmethyl)carboxyamide]-2'-deoxyuridine
  misc_feature (29)..(29): n is 5-[N-(1-naphthylmethyl)carboxyamide]-2'-deoxyuridine
agccgnncaagngcnngnnggannnaaangga

SEQ ID NO: 658 - DNA, 32 bp, Artificial Sequence
  Synthetic
  misc_feature (6)..(7): n is 5-[N-(1-naphthylmethyl)carboxyamide]-2'-deoxyuridine
  misc_feature (12)..(12): n is 5-[N-(1-naphthylmethyl)carboxyamide]-2'-deoxyuridine
  misc_feature (15)..(16): n is 5-[N-(1-naphthylmethyl)carboxyamide]-2'-deoxyuridine
  misc_feature (18)..(18): n is 5-[N-(1-naphthylmethyl)carboxyamide]-2'-deoxyuridine
  misc_feature (20)..(20): n is 2'-O-methyl-guanosine
  misc_feature (23)..(25): n is 5-[N-(1-naphthylmethyl)carboxyamide]-2'-deoxyuridine
  misc_feature (29)..(29): n is 5-[N-(1-naphthylmethyl)carboxyamide]-2'-deoxyuridine
agccgnncaagngcnngnangannnaaangga

SEQ ID NO: 659 - DNA, 32 bp, Artificial Sequence
  Synthetic
  misc_feature (6)..(7): n is 5-[N-(1-naphthylmethyl)carboxyamide]-2'-deoxyuridine
  misc_feature (12)..(12): n is 5-[N-(1-naphthylmethyl)carboxyamide]-2'-deoxyuridine
  misc_feature (15)..(16): n is 5-[N-(1-naphthylmethyl)carboxyamide]-2'-deoxyuridine
  misc_feature (18)..(18): n is 5-[N-(1-naphthylmethyl)carboxyamide]-2'-deoxyuridine
  misc_feature (21)..(21): n is 2'-O-methyl-guanosine
  misc_feature (23)..(25): n is 5-[N-(1-naphthylmethyl)carboxyamide]-2'-deoxyuridine
  misc_feature (29)..(29): n is 5-[N-(1-naphthylmethyl)carboxyamide]-2'-deoxyuridine
agccgnncaagngcnngnagnannnaaangga

SEQ ID NO: 660 - DNA, 32 bp, Artificial Sequence
  Synthetic
  misc_feature (6)..(7): n is 5-[N-(1-naphthylmethyl)carboxyamide]-2'-deoxyuridine
  misc_feature (12)..(12): n is 5-[N-(1-naphthylmethyl)carboxyamide]-2'-deoxyuridine
  misc_feature (15)..(16): n is 5-[N-(1-naphthylmethyl)carboxyamide]-2'-deoxyuridine
  misc_feature (18)..(18): n is 5-[N-(1-naphthylmethyl)carboxyamide]-2'-deoxyuridine
  misc_feature (22)..(22): n is 2'-O-methyl-adenosine
  misc_feature (23)..(25): n is 5-[N-(1-naphthylmethyl)carboxyamide]-2'-deoxyuridine
  misc_feature (29)..(29): n is 5-[N-(1-naphthylmethyl)carboxyamide]-2'-deoxyuridine
agccgnncaagngcnngnaggnnnnaaangga

SEQ ID NO: 661 - DNA, 32 bp, Artificial Sequence; identical to SEQ ID NO: 567
  Synthetic
  misc_feature (6)..(7): n is 5-[N-(1-naphthylmethyl)carboxyamide]-2'-deoxyuridine
  misc_feature (12)..(12): n is 5-[N-(1-naphthylmethyl)carboxyamide]-2'-deoxyuridine
  misc_feature (15)..(16): n is 5-[N-(1-naphthylmethyl)carboxyamide]-2'-deoxyuridine
  misc_feature (18)..(18): n is 5-[N-(1-naphthylmethyl)carboxyamide]-2'-deoxyuridine
  misc_feature (23)..(23): n is 2'-O-methyl-uridine
  misc_feature (24)..(25): n is 5-[N-(1-naphthylmethyl)carboxyamide]-2'-deoxyuridine
  misc_feature (29)..(29): n is 5-[N-(1-naphthylmethyl)carboxyamide]-2'-deoxyuridine

SEQ ID NO: 662 - DNA, 32 bp, Artificial Sequence; identical to SEQ ID NO: 567
  Synthetic
  misc_feature (6)..(7): n is 5-[N-(1-naphthylmethyl)carboxyamide]-2'-deoxyuridine
  misc_feature (12)..(12): n is 5-[N-(1-naphthylmethyl)carboxyamide]-2'-deoxyuridine
  misc_feature (15)..(16): n is 5-[N-(1-naphthylmethyl)carboxyamide]-2'-deoxyuridine
  misc_feature (18)..(18): n is 5-[N-(1-naphthylmethyl)carboxyamide]-2'-deoxyuridine
  misc_feature (23)..(23): n is 5-[N-(1-naphthylmethyl)carboxyamide]-2'-deoxyuridine
  misc_feature (24)..(24): n is 2'-O-methyl-uridine
  misc_feature (25)..(25): n is 5-[N-(1-naphthylmethyl)carboxyamide]-2'-deoxyuridine
  misc_feature (29)..(29): n is 5-[N-(1-naphthylmethyl)carboxyamide]-2'-deoxyuridine

SEQ ID NO: 663 - DNA, 32 bp, Artificial Sequence; identical to SEQ ID NO: 567
  Synthetic
  misc_feature (6)..(7): n is 5-[N-(1-naphthylmethyl)carboxyamide]-2'-deoxyuridine
  misc_feature (12)..(12): n is 5-[N-(1-naphthylmethyl)carboxyamide]-2'-deoxyuridine
  misc_feature (15)..(16): n is 5-[N-(1-naphthylmethyl)carboxyamide]-2'-deoxyuridine
  misc_feature (18)..(18): n is 5-[N-(1-naphthylmethyl)carboxyamide]-2'-deoxyuridine
  misc_feature (23)..(24): n is 5-[N-(1-naphthylmethyl)carboxyamide]-2'-deoxyuridine
  misc_feature (25)..(25): n is 2'-O-methyl-uridine
  misc_feature (29)..(29): n is 5-[N-(1-naphthylmethyl)carboxyamide]-2'-deoxyuridine

SEQ ID NO: 664 - DNA, 32 bp, Artificial Sequence
  Synthetic
  misc_feature (6)..(7): n is 5-[N-(1-naphthylmethyl)carboxyamide]-2'-deoxyuridine
  misc_feature (12)..(12): n is 5-[N-(1-naphthylmethyl)carboxyamide]-2'-deoxyuridine
  misc_feature (15)..(16): n is 5-[N-(1-naphthylmethyl)carboxyamide]-2'-deoxyuridine
  misc_feature (18)..(18): n is 5-[N-(1-naphthylmethyl)carboxyamide]-2'-deoxyuridine
  misc_feature (23)..(25): n is 5-[N-(1-naphthylmethyl)carboxyamide]-2'-deoxyuridine
  misc_feature (26)..(26): n is 2'-O-methyl-adenosine
  misc_feature (29)..(29): n is 5-[N-(1-naphthylmethyl)carboxyamide]-2'-deoxyuridine
agccgnncaagngcnngnaggannnnaangga

SEQ ID NO: 665 - DNA, 32 bp, Artificial Sequence
  Synthetic
  misc_feature (6)..(7): n is 5-[N-(1-naphthylmethyl)carboxyamide]-2'-deoxyuridine
  misc_feature (12)..(12): n is 5-[N-(1-naphthylmethyl)carboxyamide]-2'-deoxyuridine
  misc_feature (15)..(16): n is 5-[N-(1-naphthylmethyl)carboxyamide]-2'-deoxyuridine
  misc_feature (18)..(18): n is 5-[N-(1-naphthylmethyl)carboxyamide]-2'-deoxyuridine
  misc_feature (23)..(25): n is 5-[N-(1-naphthylmethyl)carboxyamide]-2'-deoxyuridine
  misc_feature (27)..(27): n is 2'-O-methyl-adenosine
  misc_feature (29)..(29): n is 5-[N-(1-naphthylmethyl)carboxyamide]-2'-deoxyuridine
agccgnncaagngcnngnaggannnanangga

SEQ ID NO: 666 - DNA, 32 bp, Artificial Sequence
  Synthetic
  misc_feature (6)..(7): n is 5-[N-(1-naphthylmethyl)carboxyamide]-2'-deoxyuridine
  misc_feature (12)..(12): n is 5-[N-(1-naphthylmethyl)carboxyamide]-2'-deoxyuridine
  misc_feature (15)..(16): n is 5-[N-(1-naphthylmethyl)carboxyamide]-2'-deoxyuridine
  misc_feature (18)..(18): n is 5-[N-(1-naphthylmethyl)carboxyamide]-2'-deoxyuridine
  misc_feature (23)..(25): n is 5-[N-(1-naphthylmethyl)carboxyamide]-2'-deoxyuridine
  misc_feature (28)..(28): n is 2'-O-methyl-adenosine
  misc_feature (29)..(29): n is 5-[N-(1-naphthylmethyl)carboxyamide]-2'-deoxyuridine
agccgnncaagngcnngnaggannnaanngga

SEQ ID NO: 667 - DNA, 32 bp, Artificial Sequence; identical to SEQ ID NO: 567
  Synthetic
  misc_feature (6)..(7): n is 5-[N-(1-naphthylmethyl)carboxyamide]-2'-deoxyuridine
  misc_feature (12)..(12): n is 5-[N-(1-naphthylmethyl)carboxyamide]-2'-deoxyuridine
  misc_feature (15)..(16): n is 5-[N-(1-naphthylmethyl)carboxyamide]-2'-deoxyuridine
  misc_feature (18)..(18): n is 5-[N-(1-naphthylmethyl)carboxyamide]-2'-deoxyuridine
  misc_feature (23)..(25): n is 5-[N-(1-naphthylmethyl)carboxyamide]-2'-deoxyuridine
  misc_feature (29)..(29): n is 2'-O-methyl-uridine

SEQ ID NO: 668 - DNA, 32 bp, Artificial Sequence
  Synthetic
  misc_feature (6)..(7): n is 5-[N-(1-naphthylmethyl)carboxyamide]-2'-deoxyuridine
  misc_feature (12)..(12): n is 5-[N-(1-naphthylmethyl)carboxyamide]-2'-deoxyuridine
  misc_feature (15)..(16): n is 5-[N-(1-naphthylmethyl)carboxyamide]-2'-deoxyuridine
  misc_feature (18)..(18): n is 5-[N-(1-naphthylmethyl)carboxyamide]-2'-deoxyuridine
  misc_feature (23)..(25): n is 5-[N-(1-naphthylmethyl)carboxyamide]-2'-deoxyuridine
  misc_feature (29)..(29): n is 5-[N-(1-naphthylmethyl)carboxyamide]-2'-deoxyuridine
  misc_feature (30)..(30): n is 2'-O-methyl-guanosine
agccgnncaagngcnngnaggannnaaannga

SEQ ID NO: 669 - DNA, 32 bp, Artificial Sequence
  Synthetic
  misc_feature (6)..(7): n is 5-[N-(1-naphthylmethyl)carboxyamide]-2'-deoxyuridine
  misc_feature (12)..(12): n is 5-[N-(1-naphthylmethyl)carboxyamide]-2'-deoxyuridine
  misc_feature (15)..(16): n is 5-[N-(1-naphthylmethyl)carboxyamide]-2'-deoxyuridine
  misc_feature (18)..(18): n is 5-[N-(1-naphthylmethyl)carboxyamide]-2'-deoxyuridine
  misc_feature (23)..(25): n is 5-[N-(1-naphthylmethyl)carboxyamide]-2'-deoxyuridine
  misc_feature (29)..(29): n is 5-[N-(1-naphthylmethyl)carboxyamide]-2'-deoxyuridine
  misc_feature (31)..(31): n is 2'-O-methyl-guanosine
agccgnncaagngcnngnaggannnaaangna

SEQ ID NO: 670 - DNA, 32 bp, Artificial Sequence
  Synthetic
  misc_feature (6)..(7): n is 5-[N-(1-naphthylmethyl)carboxyamide]-2'-deoxyuridine
  misc_feature (12)..(12): n is 5-[N-(1-naphthylmethyl)carboxyamide]-2'-deoxyuridine
  misc_feature (15)..(16): n is 5-[N-(1-naphthylmethyl)carboxyamide]-2'-deoxyuridine
  misc_feature (18)..(18): n is 5-[N-(1-naphthylmethyl)carboxyamide]-2'-deoxyuridine
  misc_feature (23)..(25): n is 5-[N-(1-naphthylmethyl)carboxyamide]-2'-deoxyuridine
  misc_feature (29)..(29): n is 5-[N-(1-naphthylmethyl)carboxyamide]-2'-deoxyuridine
  misc_feature (32)..(32): n is 2'-O-methyl-adenosine
agccgnncaagngcnngnaggannnaaanggn

SEQ ID NO: 671 - DNA, 32 bp, Artificial Sequence; identical to SEQ ID NO: 646
  Synthetic
  misc_feature (6)..(7): n is 5-[N-(1-naphthylmethyl)carboxyamide]-2'-deoxyuridine
  misc_feature (8)..(8): n is 1,3-propane diol
  misc_feature (12)..(12): n is 5-[N-(1-naphthylmethyl)carboxyamide]-2'-deoxyuridine
  misc_feature (15)..(16): n is 5-[N-(1-naphthylmethyl)carboxyamide]-2'-deoxyuridine
  misc_feature (18)..(18): n is 5-[N-(1-naphthylmethyl)carboxyamide]-2'-deoxyuridine
  misc_feature (23)..(25): n is 5-[N-(1-naphthylmethyl)carboxyamide]-2'-deoxyuridine
  misc_feature (29)..(29): n is 5-[N-(1-naphthylmethyl)carboxyamide]-2'-deoxyuridine

SEQ ID NO: 672 - DNA, 32 bp, Artificial Sequence; identical to SEQ ID NO: 655
  Synthetic
  misc_feature (6)..(7): n is 5-[N-(1-naphthylmethyl)carboxyamide]-2'-deoxyuridine
  misc_feature (12)..(12): n is 5-[N-(1-naphthylmethyl)carboxyamide]-2'-deoxyuridine
  misc_feature (15)..(16): n is 5-[N-(1-naphthylmethyl)carboxyamide]-2'-deoxyuridine
  misc_feature (17)..(17): n is 1,3-propane diol
  misc_feature (18)..(18): n is 5-[N-(1-naphthylmethyl)carboxyamide]-2'-deoxyuridine
  misc_feature (23)..(25): n is 5-[N-(1-naphthylmethyl)carboxyamide]-2'-deoxyuridine
  misc_feature (29)..(29): n is 5-[N-(1-naphthylmethyl)carboxyamide]-2'-deoxyuridine

SEQ ID NO: 673 - DNA, 32 bp, Artificial Sequence; identical to SEQ ID NO: 658
  Synthetic
  misc_feature (6)..(7): n is 5-[N-(1-naphthylmethyl)carboxyamide]-2'-deoxyuridine
  misc_feature (12)..(12): n is 5-[N-(1-naphthylmethyl)carboxyamide]-2'-deoxyuridine
  misc_feature (15)..(16): n is 5-[N-(1-naphthylmethyl)carboxyamide]-2'-deoxyuridine
  misc_feature (18)..(18): n is 5-[N-(1-naphthylmethyl)carboxyamide]-2'-deoxyuridine
  misc_feature (20)..(20): n is 1,3-propane diol
  misc_feature (23)..(25): n is 5-[N-(1-naphthylmethyl)carboxyamide]-2'-deoxyuridine
  misc_feature (29)..(29): n is 5-[N-(1-naphthylmethyl)carboxyamide]-2'-deoxyuridine

SEQ ID NO: 674 - DNA, 32 bp, Artificial Sequence
  Synthetic
  misc_feature (6)..(7): n is 5-[N-(1-naphthylmethyl)carboxyamide]-2'-deoxyuridine
  misc_feature (8)..(8): n is 1,3-propane diol
  misc_feature (12)..(12): n is 5-[N-(1-naphthylmethyl)carboxyamide]-2'-deoxyuridine
  misc_feature (15)..(16): n is 5-[N-(1-naphthylmethyl)carboxyamide]-2'-deoxyuridine
  misc_feature (17)..(17): n is 1,3-propane diol
  misc_feature (18)..(18): n is 5-[N-(1-naphthylmethyl)carboxyamide]-2'-deoxyuridine
  misc_feature (20)..(20): n is 1,3-propane diol
  misc_feature (23)..(25): n is 5-[N-(1-naphthylmethyl)carboxyamide]-2'-deoxyuridine
  misc_feature (29)..(29): n is 5-[N-(1-naphthylmethyl)carboxyamide]-2'-deoxyuridine
agccgnnnaagngcnnnnangannnaaangga

SEQ ID NO: 675 - DNA, 31 bp, Artificial Sequence
  Synthetic
  misc_feature (6)..(7): n is 5-[N-(1-naphthylmethyl)carboxyamide]-2'-deoxyuridine
  misc_feature (11)..(11): n is 5-[N-(1-naphthylmethyl)carboxyamide]-2'-deoxyuridine
  misc_feature (14)..(15): n is 5-[N-(1-naphthylmethyl)carboxyamide]-2'-deoxyuridine
  misc_feature (17)..(17): n is 5-[N-(1-naphthylmethyl)carboxyamide]-2'-deoxyuridine
  misc_feature (22)..(24): n is 5-[N-(1-naphthylmethyl)carboxyamide]-2'-deoxyuridine
  misc_feature (28)..(28): n is 5-[N-(1-naphthylmethyl)carboxyamide]-2'-deoxyuridine
agccgnnaagngcnngnaggannnaaangga

SEQ ID NO: 676 - DNA, 31 bp, Artificial Sequence
  Synthetic
  misc_feature (6)..(7): n is 5-[N-(1-naphthylmethyl)carboxyamide]-2'-deoxyuridine
  misc_feature (12)..(12): n is 5-[N-(1-naphthylmethyl)carboxyamide]-2'-deoxyuridine
  misc_feature (15)..(16): n is 5-[N-(1-naphthylmethyl)carboxyamide]-2'-deoxyuridine
  misc_feature (17)..(17): n is 5-[N-(1-naphthylmethyl)carboxyamide]-2'-deoxyuridine
  misc_feature (22)..(24): n is 5-[N-(1-naphthylmethyl)carboxyamide]-2'-deoxyuridine
  misc_feature (28)..(28): n is 5-[N-(1-naphthylmethyl)carboxyamide]-2'-deoxyuridine
agccgnncaagngcnnnaggannnaaangga

SEQ ID NO: 677 - DNA, 31 bp, Artificial Sequence
  Synthetic
  misc_feature (6)..(7): n is 5-[N-(1-naphthylmethyl)carboxyamide]-2'-deoxyuridine
  misc_feature (12)..(12): n is 5-[N-(1-naphthylmethyl)carboxyamide]-2'-deoxyuridine
  misc_feature (15)..(16): n is 5-[N-(1-naphthylmethyl)carboxyamide]-2'-deoxyuridine
  misc_feature (18)..(18): n is 5-[N-(1-naphthylmethyl)carboxyamide]-2'-deoxyuridine
  misc_feature (22)..(24): n is 5-[N-(1-naphthylmethyl)carboxyamide]-2'-deoxyuridine
  misc_feature (28)..(28): n is 5-[N-(1-naphthylmethyl)carboxyamide]-2'-deoxyuridine
agccgnncaagngcnngnagannnaaangga

SEQ ID NO: 678 - DNA, 30 bp, Artificial Sequence
  Synthetic
  misc_feature (4)..(5): n is 5-[N-(1-naphthylmethyl)carboxyamide]-2'-deoxyuridine
  misc_feature (10)..(10): n is 5-[N-(1-naphthylmethyl)carboxyamide]-2'-deoxyuridine
  misc_feature (13)..(14): n is 5-[N-(1-naphthylmethyl)carboxyamide]-2'-deoxyuridine
  misc_feature (16)..(16): n is 5-[N-(1-naphthylmethyl)carboxyamide]-2'-deoxyuridine
  misc_feature (21)..(23): n is 5-[N-(1-naphthylmethyl)carboxyamide]-2'-deoxyuridine
  misc_feature (27)..(27): n is 5-[N-(1-naphthylmethyl)carboxyamide]-2'-deoxyuridine
ccgnnaaagngcnngnaggannnaaangga

SEQ ID NO: 679 - DNA, 30 bp, Artificial Sequence
  Synthetic
  misc_feature (4)..(5): n is 5-[N-(1-naphthylmethyl)carboxyamide]-2'-deoxyuridine
  misc_feature (10)..(10): n is 5-[N-(1-naphthylmethyl)carboxyamide]-2'-deoxyuridine
  misc_feature (13)..(14): n is 5-[N-(1-naphthylmethyl)carboxyamide]-2'-deoxyuridine
  misc_feature (16)..(16): n is 5-[N-(1-naphthylmethyl)carboxyamide]-2'-deoxyuridine
  misc_feature (21)..(23): n is 5-[N-(1-naphthylmethyl)carboxyamide]-2'-deoxyuridine
  misc_feature (27)..(27): n is 5-[N-(1-naphthylmethyl)carboxyamide]-2'-deoxyuridine
ccgnngaagngcnngnaggannnaaangga

SEQ ID NO: 680 - DNA, 30 bp, Artificial Sequence
  Synthetic
  misc_feature (4)..(5): n is 5-[N-(1-naphthylmethyl)carboxyamide]-2'-deoxyuridine
  misc_feature (10)..(10): n is 5-[N-(1-naphthylmethyl)carboxyamide]-2'-deoxyuridine
  misc_feature (13)..(14): n is 5-[N-(1-naphthylmethyl)carboxyamide]-2'-deoxyuridine
  misc_feature (16)..(16): n is 5-[N-(1-naphthylmethyl)carboxyamide]-2'-deoxyuridine
  misc_feature (21)..(23): n is 5-[N-(1-naphthylmethyl)carboxyamide]-2'-deoxyuridine
  misc_feature (27)..(27): n is 5-[N-(1-naphthylmethyl)carboxyamide]-2'-deoxyuridine
ccgnntaagngcnngnaggannnaaangga

SEQ ID NO: 681 - DNA, 30 bp, Artificial Sequence
  Synthetic
  misc_feature (4)..(5): n is 5-[N-(1-nap[hthylmethyl)carboxyamide]-2'-deoxyuridine
  misc_feature (10)..(10): n is 5-[N-(1-nap[hthylmethyl)carboxyamide]-2'-deoxyuridine
  misc_feature (13)..(14): n is 5-[N-(1-nap[hthylmethyl)carboxyamide]-2'-deoxyuridine
  misc_feature (16)..(16): n is 5-[N-(1-nap[hthylmethyl)carboxyamide]-2'-deoxyuridine
  misc_feature (21)..(23): n is 5-[N-(1-nap[hthylmethyl)carboxyamide]-2'-deoxyuridine
  misc_feature (27)..(27): n is 5-[N-(1-nap[hthylmethyl)carboxyamide]-2'-deoxyuridine
ccgnncaagngcnnanaggannnaaangga

SEQ ID NO: 682 - DNA, 30 bp, Artificial Sequence
  Synthetic
  misc_feature (4)..(5): n is 5-[N-(1-naphthylmethyl)carboxyamide]-2'-deoxyuridine
  misc_feature (10)..(10): n is 5-[N-(1-naphthylmethyl)carboxyamide]-2'-deoxyuridine
  misc_feature (13)..(14): n is 5-[N-(1-naphthylmethyl)carboxyamide]-2'-deoxyuridine
  misc_feature (16)..(16): n is 5-[N-(1-naphthylmethyl)carboxyamide]-2'-deoxyuridine
  misc_feature (21)..(23): n is 5-[N-(1-naphthylmethyl)carboxyamide]-2'-deoxyuridine
  misc_feature (27)..(27): n is 5-[N-(1-naphthylmethyl)carboxyamide]-2'-deoxyuridine
ccgnncaagngcnncnaggannnaaangga

SEQ ID NO: 683 - DNA, 30 bp, Artificial Sequence
  Synthetic
  misc_feature (4)..(5): n is 5-[N-(1-naphthylmethyl)carboxyamide]-2'-deoxyuridine
  misc_feature (10)..(10): n is 5-[N-(1-naphthylmethyl)carboxyamide]-2'-deoxyuridine
  misc_feature (13)..(14): n is 5-[N-(1-naphthylmethyl)carboxyamide]-2'-deoxyuridine
  misc_feature (16)..(16): n is 5-[N-(1-naphthylmethyl)carboxyamide]-2'-deoxyuridine
  misc_feature (21)..(23): n is 5-[N-(1-naphthylmethyl)carboxyamide]-2'-deoxyuridine
  misc_feature (27)..(27): n is 5-[N-(1-naphthylmethyl)carboxyamide]-2'-deoxyuridine
ccgnncaagngcnntnaggannnaaangga

SEQ ID NO: 684 - DNA, 30 bp, Artificial Sequence
  Synthetic
  misc_feature (4)..(5): n is 5-[N-(1-naphthylmethyl)carboxyamide]-2'-deoxyuridine
  misc_feature (10)..(10): n is 5-[N-(1-naphthylmethyl)carboxyamide]-2'-deoxyuridine
  misc_feature (13)..(14): n is 5-[N-(1-naphthylmethyl)carboxyamide]-2'-deoxyuridine
  misc_feature (16)..(16): n is 5-[N-(1-naphthylmethyl)carboxyamide]-2'-deoxyuridine
  misc_feature (21)..(23): n is 5-[N-(1-naphthylmethyl)carboxyamide]-2'-deoxyuridine
  misc_feature (27)..(27): n is 5-[N-(1-naphthylmethyl)carboxyamide]-2'-deoxyuridine
ccgnncaagngcnngnaagannnaaangga

SEQ ID NO: 685 - DNA, 30 bp, Artificial Sequence
  Synthetic
  misc_feature (4)..(5): n is 5-[N-(1-naphthylmethyl)carboxyamid[e]-2'-deoxyuridine
  misc_feature (10)..(10): n is 5-[N-(1-naphthylmethyl)carboxyamid[e]-2'-deoxyuridine
  misc_feature (13)..(14): n is 5-[N-(1-naphthylmethyl)carboxyamid[e]-2'-deoxyuridine
  misc_feature (16)..(16): n is 5-[N-(1-naphthylmethyl)carboxyamid[e]-2'-deoxyuridine
  misc_feature (21)..(23): n is 5-[N-(1-naphthylmethyl)carboxyamid[e]-2'-deoxyuridine
  misc_feature (27)..(27): n is 5-[N-(1-naphthylmethyl)carboxyamid[e]-2'-deoxyuridine
ccgnncaagngcnngnacgannnaaangga

SEQ ID NO: 686 - DNA, 30 bp, Artificial Sequence
  Synthetic
  misc_feature (4)..(5): n is 5-[N-(1-naphthylmethyl)carboxyamide]-2'-deoxyuridine
  misc_feature (10)..(10): n is 5-[N-(1-naphthylmethyl)carboxyamide]-2'-deoxyuridine
  misc_feature (13)..(14): n is 5-[N-(1-naphthylmethyl)carboxyamide]-2'-deoxyuridine
  misc_feature (16)..(16): n is 5-[N-(1-naphthylmethyl)carboxyamide]-2'-deoxyuridine
  misc_feature (21)..(23): n is 5-[N-(1-naphthylmethyl)carboxyamide]-2'-deoxyuridine
  misc_feature (27)..(27): n is 5-[N-(1-naphthylmethyl)carboxyamide]-2'-deoxyuridine
ccgnncaagngcnngnatgannnaaangga

SEQ ID NO: 687 - DNA, 29 bp, Artificial Sequence
  Synthetic
  misc_feature (4)..(4): n is 5-[N-(1-naphthylmethyl)carboxyamide]-2'-O-methyl-uridine
  misc_feature (5)..(5): n is 5-[N-(1-naphthylmethyl)carboxyamide]-2'-deoxyuridine
  misc_feature (10)..(10): n is 5-[N-(1-naphthylmethyl)carboxyamide]-2'-deoxyuridine
  misc_feature (13)..(14): n is 5-[N-(1-naphthylmethyl)carboxyamide]-2'-deoxyuridine
  misc_feature (16)..(16): n is 5-[N-(1-naphthylmethyl)carboxyamide]-2'-deoxyuridine
  misc_feature (21)..(23): n is 5-[N-(1-naphthylmethyl)carboxyamide]-2'-deoxyuridine
  misc_feature (27)..(27): n is 5-[N-(1-naphthylmethyl)carboxyamide]-2'-deoxyuridine
ccgnncaagngcnngnaggannnaaangg

SEQ ID NO: 688 - DNA, 29 bp, Artificial Sequence
  Synthetic
  misc_feature (4)..(4): n is 5-[N-(1-naphthylmethyl)carboxyamide]-2'-deoxyuridine
  misc_feature (5)..(5): n is 5-[N-(1-naphthylmethyl)carboxyamide]-2'-O-methyl-uridine
  misc_feature (10)..(10): n is 5-[N-(1-naphthylmethyl)carboxyamide]-2'-deoxyuridine
  misc_feature (13)..(14): n is 5-[N-(1-naphthylmethyl)carboxyamide]-2'-deoxyuridine
  misc_feature (16)..(16): n is 5-[N-(1-naphthylmethyl)carboxyamide]-2'-deoxyuridine
  misc_feature (21)..(23): n is 5-[N-(1-naphthylmethyl)carboxyamide]-2'-deoxyuridine
  misc_feature (27)..(27): n is 5-[N-(1-naphthylmethyl)carboxyamide]-2'-deoxyuridine
ccgnncaagngcnngnaggannnaaangg

SEQ ID NO: 689 - DNA, 29 bp, Artificial Sequence
  Synthetic
  misc_feature (4)..(5): n is 5-[N-(1-naphthylmethyl)carboxyamide]-2'-deoxyuridine
  misc_feature (10)..(10): n is 5-[N-(1-naphthylmethyl)carboxyamide]-2'-O-methyl-uridine
  misc_feature (13)..(14): n is 5-[N-(1-naphthylmethyl)carboxyamide]-2'-deoxyuridine
  misc_feature (16)..(16): n is 5-[N-(1-naphthylmethyl)carboxyamide]-2'-deoxyuridine
  misc_feature (21)..(23): n is 5-[N-(1-naphthylmethyl)carboxyamide]-2'-deoxyuridine
  misc_feature (27)..(27): n is 5-[N-(1-naphthylmethyl)carboxyamide]-2'-deoxyuridine
ccgnncaagngcnngnaggannnaaangg

SEQ ID NO: 690 - DNA, 29 bp, Artificial Sequence
  Synthetic
  misc_feature (4)..(5): n is 5-[N-(1-naphthylmethyl)carboxyamide]-2'-deoxyuridine
  misc_feature (10)..(10): n is 5-[N-(1-naphthylmethyl)carboxyamide]-2'-deoxyuridine
  misc_feature (13)..(13): n is 5-[N-(1-naphthylmethyl)carboxyamide]-2'-O-methyl-uridine
  misc_feature (14)..(14): n is 5-[N-(1-naphthylmethyl)carboxyamide]-2'-deoxyuridine
  misc_feature (16)..(16): n is 5-[N-(1-naphthylmethyl)carboxyamide]-2'-deoxyuridine
  misc_feature (21)..(23): n is 5-[N-(1-naphthylmethyl)carboxyamide]-2'-deoxyuridine
  misc_feature (27)..(27): n is 5-[N-(1-naphthylmethyl)carboxyamide]-2'-deoxyuridine
ccgnncaagngcnngnaggannnaaangg

SEQ ID NO: 691 - DNA, 29 bp, Artificial Sequence
  Synthetic
  misc_feature (4)..(5): n is 5-[N-(1-naphthylmethyl)carboxyamide]-2'-deoxyuridine
  misc_feature (10)..(10): n is 5-[N-(1-naphthylmethyl)carboxyamide]-2'-deoxyuridine
  misc_feature (13)..(13): n is 5-[N-(1-naphthylmethyl)carboxyamide]-2'-deoxyuridine
  misc_feature (14)..(14): n is 5-[N-(1-naphthylmethyl)carboxyamide]-2'-O-methyl-uridine
  misc_feature (16)..(16): n is 5-[N-(1-naphthylmethyl)carboxyamide]-2'-deoxyuridine
  misc_feature (21)..(23): n is 5-[N-(1-naphthylmethyl)carboxyamide]-2'-deoxyuridine
  misc_feature (27)..(27): n is 5-[N-(1-naphthylmethyl)carboxyamide]-2'-deoxyuridine
ccgnncaagngcnngnaggannnaaangg

SEQ ID NO: 692 - DNA, 29 bp, Artificial Sequence
  Synthetic
  misc_feature (4)..(5): n is 5-[N-(1-naphthylmethyl)carboxyamide]-2'-deoxyuridine
  misc_feature (10)..(10): n is 5-[N-(1-naphthylmethyl)carboxyamide]-2'-deoxyuridine
  misc_feature (13)..(14): n is 5-[N-(1-naphthylmethyl)carboxyamide]-2'-deoxyuridine
  misc_feature (16)..(16): n is 5-[N-(1-naphthylmethyl)carboxyamide]-2'-O-methyl-uridine
  misc_feature (21)..(23): n is 5-[N-(1-naphthylmethyl)carboxyamide]-2'-deoxyuridine
  misc_feature (27)..(27): n is 5-[N-(1-naphthylmethyl)carboxyamide]-2'-deoxyuridine
ccgnncaagngcnngnaggannnaaangg

SEQ ID NO: 693 - DNA, 29 bp, Artificial Sequence
  Synthetic
  misc_feature (4)..(5): n is 5-[N-(1-naphthylmethyl)carboxyamide]-2'-deoxyuridine
  misc_feature (10)..(10): n is 5-[N-(1-naphthylmethyl)carboxyamide]-2'-deoxyuridine
  misc_feature (13)..(14): n is 5-[N-(1-naphthylmethyl)carboxyamide]-2'-deoxyuridine
  misc_feature (16)..(16): n is 5-[N-(1-naphthylmethyl)carboxyamide]-2'-deoxyuridine
  misc_feature (21)..(21): n is 5-[N-(1-naphthylmethyl)carboxyamide]-2'-O-methyl-uridine
  misc_feature (22)..(23): n is 5-[N-(1-naphthylmethyl)carboxyamide]-2'-deoxyuridine
  misc_feature (27)..(27): n is 5-[N-(1-naphthylmethyl)carboxyamide]-2'-deoxyuridine
ccgnncaagngcnngnaggannnaaangg

SEQ ID NO: 694 - DNA, 29 bp, Artificial Sequence
  Synthetic
  misc_feature (4)..(5): n is 5-[N-(1-naphthylmethyl)carboxyamide]-2'-deoxyuridine
  misc_feature (10)..(10): n is 5-[N-(1-naphthylmethyl)carboxyamide]-2'-deoxyuridine
  misc_feature (13)..(14): n is 5-[N-(1-naphthylmethyl)carboxyamide]-2'-deoxyuridine
  misc_feature (16)..(16): n is 5-[N-(1-naphthylmethyl)carboxyamide]-2'-deoxyuridine
  misc_feature (21)..(21): n is 5-[N-(1-naphthylmethyl)carboxyamide]-2'-deoxyuridine
  misc_feature (22)..(22): n is 5-[N-(1-naphthylmethyl)carboxyamide]-2'-O-methyl-uridine
  misc_feature (23)..(23): n is 5-[N-(1-naphthylmethyl)carboxyamide]-2'-deoxyuridine
  misc_feature (27)..(27): n is 5-[N-(1-naphthylmethyl)carboxyamide]-2'-deoxyuridine
ccgnncaagngcnngnaggannnaaangg

SEQ ID NO: 695 - DNA, 29 bp, Artificial Sequence
  Synthetic
  misc_feature (4)..(5): n is 5-[N-(1-naphthylmethyl)carboxyamide]-2'-deoxyuridine
  misc_feature (10)..(10): n is 5-[N-(1-naphthylmethyl)carboxyamide]-2'-deoxyuridine
  misc_feature (13)..(14): n is 5-[N-(1-naphthylmethyl)carboxyamide]-2'-deoxyuridine
  misc_feature (16)..(16): n is 5-[N-(1-naphthylmethyl)carboxyamide]-2'-deoxyuridine
  misc_feature (21)..(22): n is 5-[N-(1-naphthylmethyl)carboxyamide]-2'-deoxyuridine
  misc_feature (23)..(23): n is 5-[N-(1-naphthylmethyl)carboxyamide]-2'-O-methyl-uridine
  misc_feature (27)..(27): n is 5-[N-(1-naphthylmethyl)carboxyamide]-2'-deoxyuridine
ccgnncaagngcnngnaggannnaaangg

SEQ ID NO: 696 - DNA, 29 bp, Artificial Sequence
  Synthetic
  misc_feature (4)..(5): n is 5-[N-(1-naphthylmethyl)carboxyamide]-2'-deoxyuridine
  misc_feature (10)..(10): n is 5-[N-(1-naphthylmethyl)carboxyamide]-2'-deoxyuridine
  misc_feature (13)..(14): n is 5-[N-(1-naphthylmethyl)carboxyamide]-2'-deoxyuridine
  misc_feature (16)..(16): n is 5-[N-(1-naphthylmethyl)carboxyamide]-2'-deoxyuridine
  misc_feature (21)..(23): n is 5-[N-(1-naphthylmethyl)carboxyamide]-2'-deoxyuridine
  misc_feature (27)..(27): n is 5-[N-(1-naphthylmethyl)carboxyamide]-2'- O-methyl-uridine
ccgnncaagngcnngnaggannnaaangg

SEQ ID NO: 697 - DNA, 29 bp, Artificial Sequence
  Synthetic
  misc_feature (4)..(5): n is 5-[N-(1-naphthylmethyl)carboxyamide]-2'-deoxyuridine
  misc_feature (10)..(10): n is 5-[N-(1-naphthylmethyl)carboxyamide]-2'-deoxyuridine
  misc_feature (13)..(14): n is 5-[N-(1-naphthylmethyl)carboxyamide]-2'-deoxyuridine
  misc_feature (15)..(15): n is 1,3-propane diol
  misc_feature (16)..(16): n is 5-[N-(1-naphthylmethyl)carboxyamide]-2'-deoxyuridine
  misc_feature (18)..(18): n is 1,3-propane diol
  misc_feature (21)..(23): n is 5-[N-(1-naphthylmethyl)carboxyamide]-2'-deoxyuridine
  misc_feature (27)..(27): n is 5-[N-(1-naphthylmethyl)carboxyamide]-2'-deoxyuridine
ccgnncaagngcnnnnangannnaaangg

SEQ ID NO: 698 - DNA, 29 bp, Artificial Sequence
  Synthetic
  misc_feature (4)..(5): n is 5-[N-(1-naphthylmethyl)carboxyamide]-2'-deoxyuridine
  misc_feature (9)..(9): n is 2'-O-methyl-guanosine
  misc_feature (10)..(10): n is 5-[N-(1-naphthylmethyl)carboxyamide]-2'-deoxyuridine
  misc_feature (13)..(14): n is 5-[N-(1-naphthylmethyl)carboxyamide]-2'-deoxyuridine
  misc_feature (15)..(15): n is 1,3-propane diol
  misc_feature (16)..(16): n is 5-[N-(1-naphthylmethyl)carboxyamide]-2'-deoxyuridine
  misc_feature (17)..(17): n is 2'-O-methyl-adenosine
  misc_feature (18)..(18): n is 1,3-propane diol
  misc_feature (21)..(23): n is 5-[N-(1-naphthylmethyl)carboxyamide]-2'-deoxyuridine
  misc_feature (27)..(27): n is 5-[N-(1-naphthylmethyl)carboxyamide]-2'-deoxyuridine
ccgnncaanngcnnnnnngannnaaangg

SEQ ID NO: 699 - DNA, 29 bp, Artificial Sequence
  Synthetic
  misc_feature (4)..(5): n is 5-[N-(1-naphthylmethyl)carboxyamide]-2'-deoxyuridine
  misc_feature (6)..(6): n is 2'-O-methyl-cytidine
  misc_feature (9)..(9): n is 2'-O-methyl-guanosine
  misc_feature (10)..(10): n is 5-[N-(1-naphthylmethyl)carboxyamide]-2'-deoxyuridine
  misc_feature (12)..(12): n is 2'-O-methyl-cytidine
  misc_feature (13)..(14): n is 5-[N-(1-naphthylmethyl)carboxyamide]-2'-deoxyuridine
  misc_feature (15)..(15): n is 1,3-propane diol
  misc_feature (16)..(16): n is 5-[N-(1-naphthylmethyl)carboxyamide]-2'-deoxyuridine
  misc_feature (17)..(17): n is 2'-O-methyl-adenosine
  misc_feature (18)..(18): n is 1,3-propane diol
  misc_feature (21)..(23): n is 5-[N-(1-naphthylmethyl)carboxyamide]-2'-deoxyuridine
  misc_feature (27)..(27): n is 5-[N-(1-naphthylmethyl)carboxyamide]-2'-deoxyuridine
  misc_feature (28)..(29): n is 2'-O-methyl-guanosine
ccgnnnaanngnnnnnnngannnaaannn

SEQ ID NO: 700 - DNA, 29 bp, Artificial Sequence
  Synthetic
  misc_feature (1)..(1): n is 2'-O-methyl-cytidine
  misc_feature (4)..(5): n is 5-[N-(1-naphthylmethyl)carboxyamide]-2'-deoxyuridine
  misc_feature (6)..(6): n is 2'-O-methyl-cytidine
  misc_feature (9)..(9): n is 2'-O-methyl-guanosine
  misc_feature (10)..(10): n is 5-[N-(1-naphthylmethyl)carboxyamide]-2'-deoxyuridine
  misc_feature (12)..(12): n is 2'-O-methyl-cytidine
  misc_feature (13)..(14): n is 5-[N-(1-naphthylmethyl)carboxyamide]-2'-deoxyuridine
  misc_feature (15)..(15): n is 1,3-propane diol
  misc_feature (16)..(16): n is 5-[N-(1-naphthylmethyl)carboxyamide]-2'-deoxyuridine
  misc_feature (17)..(17): n is 2'-O-methyl-adenosine
  misc_feature (18)..(18): n is 1,3-propane diol
  misc_feature (21)..(23): n is 5-[N-(1-naphthylmethyl)carboxyamide]-2'-deoxyuridine
  misc_feature (25)..(25): n is 2'-O-methyl-adenosine
  misc_feature (27)..(27): n is 5-[N-(1-naphthylmethyl)carboxyamide]-2'-deoxyuridine
  misc_feature (28)..(29): n is 2'-O-methyl-guanosine
ncgnnnaanngnnnnnnngannnanannn

SEQ ID NO: 701 - DNA, 29 bp, Artificial Sequence
  Synthetic
  misc_feature (4)..(5): n is 5-[N-(1-naphthylmethyl)carboxyamide]-2'-deoxyuridine
  misc_feature (9)..(9): n is 2'-O-methyl-guanosine
  misc_feature (10)..(10): n is 5-[N-(1-naphthylmethyl)carboxyamide]-2'-deoxyuridine
  misc_feature (13)..(14): n is 5-[N-(1-naphthylmethyl)carboxyamide]-2'-deoxyuridine
  misc_feature (15)..(15): n is 1,3-propane diol
  misc_feature (16)..(16): n is 5-[N-(1-naphthylmethyl)carboxyamide]-2'-deoxyuridine
  misc_feature (17)..(17): n is 2'-O-methyl-adenosine
  misc_feature (21)..(23): n is 5-[N-(1-naphthylmethyl)carboxyamide]-2'-deoxyuridine
  misc_feature (27)..(27): n is 5-[N-(1-naphthylmethyl)carboxyamide]-2'-deoxyuridine
ccgnncaanngcnnnnnggannnaaangg

SEQ ID NO: 702 - DNA, 29 bp, Artificial Sequence
  Synthetic
  misc_feature (4)..(5): n is 5-[N-(1-naphthylmethyl)carboxyamide]-2'-deoxyuridine
  misc_feature (6)..(6): n is 2'-O-methyl-cytidine
  misc_feature (9)..(9): n is 2'-O-methyl-guanosine
  misc_feature (10)..(10): n is 5-[N-(1-naphthylmethyl)carboxyamide]-2'-deoxyuridine
  misc_feature (12)..(12): n is 2'-O-methyl-cytidine
  misc_feature (13)..(14): n is 5-[N-(1-naphthylmethyl)carboxyamide]-2'-deoxyuridine
  misc_feature (15)..(15): n is 1,3-propane diol
  misc_feature (16)..(16): n is 5-[N-(1-naphthylmethyl)carboxyamide]-2'-deoxyuridine
  misc_feature (17)..(17): n is 2'-O-methyl-adenosine
  misc_feature (18)..(18): n is 2'-O-methyl-guanosine
  misc_feature (21)..(23): n is 5-[N-(1-naphthylmethyl)carboxyamide]-2'-deoxyuridine
  misc_feature (27)..(27): n is 5-[N-(1-naphthylmethyl)carboxyamide]-2'-deoxyuridine
  misc_feature (28)..(29): n is 2'-O-methyl-guanosine
ccgnnnaanngnnnnnnngannnaaannn

SEQ ID NO: 703 - DNA, 29 bp, Artificial Sequence
  Synthetic
  misc_feature (1)..(1): n is 2'-O-methyl-cytidine
  misc_feature (4)..(5): n is 5-[N-(1-naphthylmethyl)carboxyamide]-2'-deoxyuridine
  misc_feature (6)..(6): n is 2'-O-methyl-cytidine
  misc_feature (9)..(9): n is 2'-O-methyl-guanosine
  misc_feature (10)..(10): n is 5-[N-(1-naphthylmethyl)carboxyamide]-2'-deoxyuridine
  misc_feature (12)..(12): n is 2'-O-methyl-cytidine
  misc_feature (13)..(14): n is 5-[N-(1-naphthylmethyl)carboxyamide]-2'-deoxyuridine
  misc_feature (15)..(15): n is 1,3-propane diol
  misc_feature (16)..(16): n is 5-[N-(1-naphthylmethyl)carboxyamide]-2'-deoxyuridine
  misc_feature (17)..(17): n is 2'-O-methyl-adenosine
  misc_feature (18)..(18): n is 2'-O-methyl-guanosine
  misc_feature (21)..(23): n is 5-[N-(1-naphthylmethyl)carboxyamide]-2'-deoxyuridine
  misc_feature (25)..(25): n is 2'-O-methyl-adenosine
  misc_feature (27)..(27): n is 5-[N-(1-naphthylmethyl)carboxyamide]-2'-deoxyuridine
  misc_feature (28)..(29): n is 2'-O-methyl-guanosine
ncgnnnaanngnnnnnnngannnanannn

SEQ ID NO: 704 - DNA, 29 bp, Artificial Sequence
  Synthetic
  misc_feature (4)..(5): n is 5-[N-(1-naphthylmethyl)carboxyamide]-2'-deoxyuridine
  misc_feature (6)..(6): n is 2'-O-methyl-cytidine
  misc_feature (9)..(9): n is 2'-O-methyl-guanosine
  misc_feature (10)..(10): n is 5-[N-(1-naphthylmethyl)carboxyamide]-2'-deoxyuridine
  misc_feature (12)..(12): n is 2'-O-methyl-cytidine
  misc_feature (13)..(14): n is 5-[N-(1-naphthylmethyl)carboxyamide]-2'-deoxyuridine
  misc_feature (15)..(15): n is 1,3-propane diol
  misc_feature (16)..(16): n is 5-[N-(1-naphthylmethyl)carboxyamide]-2'-deoxyuridine
  misc_feature (17)..(17): n is 2'-O-methyl-adenosine
  misc_feature (18)..(18): n is 2'-O-methyl-guanosine
  misc_feature (21)..(21): n is 5-[N-(1-naphthylmethyl)carboxyamide]-2'-deoxyuridine
  misc_feature (22)..(22): n is 5-[N-(1-naphthylmethyl)carboxyamide]-2'-O-methyl-uridine
  misc_feature (23)..(23): n is 5-[N-(1-naphthylmethyl)carboxyamide]-2'-deoxyuridine
  misc_feature (27)..(27): n is 5-[N-(1-naphthylmethyl)carboxyamide]-2'-deoxyuridine
  misc_feature (28)..(29): n is 2'-O-methyl-guanosine
ccgnnnaanngnnnnnnngannnaaannn

SEQ ID NO: 705 - DNA, 29 bp, Artificial Sequence
  Synthetic
  misc_feature (4)..(5): n is 5-[N-(1-naphthylmethyl)carboxyamide]-2'-deoxyuridine
  misc_feature (6)..(6): n is 2'-O-methyl-cytidine
  misc_feature (9)..(9): n is 2'-O-methyl-guanosine
  misc_feature (10)..(10): n is 5-[N-(1-naphthylmethyl)carboxyamide]-2'-deoxyuridine
  misc_feature (12)..(12): n is 2'-O-methyl-cytidine
  misc_feature (13)..(14): n is 5-[N-(1-naphthylmethyl)carboxyamide]-2'-deoxyuridine
  misc_feature (15)..(15): n is 2'-O-methyl-guanosine
  misc_feature (16)..(16): n is 5-[N-(1-naphthylmethyl)carboxyamide]-2'-deoxyuridine
  misc_feature (17)..(17): n is 2'-O-methyl-adenosine
  misc_feature (18)..(18): n is 2'-O-methyl-guanosine
  misc_feature (21)..(23): n is 5-[N-(1-naphthylmethyl)carboxyamide]-2'-deoxyuridine
  misc_feature (27)..(27): n is 5-[N-(1-naphthylmethyl)carboxyamide]-2'-deoxyuridine
  misc_feature (28)..(29): n is 2'-O-methyl-guanosine
ccgnnnaanngnnnnnnngannnaaannn

SEQ ID NO: 706 - DNA, 29 bp, Artificial Sequence
  Synthetic
  misc_feature (4)..(5): n is 5-[N-(1-naphthylmethyl)carboxyamide]-2'-deoxyuridine
  misc_feature (6)..(6): n is 2'-O-methyl-cytidine
  misc_feature (9)..(9): n is 2'-O-methyl-guanosine
  misc_feature (10)..(10): n is 5-[N-(1-naphthylmethyl)carboxyamide]-2'-deoxyuridine
  misc_feature (12)..(12): n is 2'-O-methyl-cytidine
  misc_feature (13)..(14): n is 5-[N-(1-naphthylmethyl)carboxyamide]-2'-deoxyuridine
  misc_feature (15)..(15): n is 2'-O-methyl-guanosine
  misc_feature (16)..(16): n is 5-[N-(1-naphthylmethyl)carboxyamide]-2'-deoxyuridine
  misc_feature (17)..(17): n is 2'-O-methyl-adenosine
  misc_feature (18)..(18): n is 2'-O-methyl-guanosine
  misc_feature (21)..(21): n is 5-[N-(1-naphthylmethyl)carboxyamide]-2'-deoxyuridine
  misc_feature (22)..(22): n is 5-[N-(1-naphthylmethyl)carboxyamide]-2'-O-methyl-uridine
  misc_feature (23)..(23): n is 5-[N-(1-naphthylmethyl)carboxyamide]-2'-deoxyuridine
  misc_feature (27)..(27): n is 5-[N-(1-naphthylmethyl)carboxyamide]-2'-deoxyuridine
  misc_feature (28)..(29): n is 2'-O-methyl-guanosine
ccgnnnaanngnnnnnnngannnaaannn

SEQ ID NO: 707 - DNA, 48 bp, Artificial Sequence
  Synthetic
  misc_feature (1)..(1): n is 5-(N-benzylcarboxyamide)-2'-deoxyuridine
  misc_feature (2)..(2): n is 5-[N-(3,4-methylenedioxyphenyl-methyl)carboxyamide]-2'-deoxyuridi ne
  misc_feature (3)..(3): n is 2'-O-methyl-adenosine
  misc_feature (5)..(5): n is hexaethylene glycol
  misc_feature (7)..(7): n is 5-(N-benzylcarboxyamide)-2'-O-methyl-uridine
  misc_feature (8)..(8): n is 5-(N-benzylcarboxyamide)-2'-deoxyuridine
  misc_feature (11)..(11): n is 1,3-propane diol
  misc_feature (12)..(12): n is 2'-O-methyl-cytidine
  misc_feature (16)..(17): n is 5-(N-benzylcarboxyamide)-2'-deoxyuridine
  misc_feature (18)..(18): n is 5-(N-benzylcarboxyamide)-2'-O-methyl-uridine
  misc_feature (19)..(19): n is 2'-O-methyl-adenosine
  misc_feature (20)..(20): n is 5-(N-benzylcarboxyamide)-2'-deoxyuridine
  misc_feature (21)..(21): n is 2'-O-methyl-adenosine
  misc_feature (24)..(24): n is 2'-O-methyl-guanosine
  misc_feature (25)..(25): n is 5-(N-benzylcarboxyamide)-2'-deoxyuridine
  misc_feature (26)..(26): n is 5-[N-(3,4-methylenedioxyphenyl-methyl)carboxyamide]-2'-deoxyuridi ne
  misc_feature (27)..(27): n is 2'-O-methyl-adenosine
  misc_feature (29)..(29): n is hexaethylene glycol
  misc_feature (31)..(31): n is 5-(N-benzylcarboxyamide)-2'-O-methyl-uridine
  misc_feature (32)..(32): n is 5-(N-benzylcarboxyamide)-2'-deoxyuridine
  misc_feature (35)..(35): n is 1,3-propane diol
  misc_feature (36)..(36): n is 2'-O-methyl-cytidine
  misc_feature (40)..(41): n is 5-(N-benzylcarboxyamide)-2'-deoxyuridine
  misc_feature (42)..(42): n is 5-(N-benzylcarboxyamide)-2'-O-methyl-uridine
  misc_feature (43)..(43): n is 2'-O-methyl-adenosine
  misc_feature (44)..(44): n is 5-(N-benzylcarboxyamide)-2'-deoxyuridine
  misc_feature (45)..(45): n is 2'-O-methyl-adenosine
  misc_feature (48)..(48): n is 2'-O-methyl-guanosine
nnncngnnacnngcgnnnnnngcnnnncngnnacnngcgnnnnnngcn

SEQ ID NO: 708 - DNA, 49 bp, Artificial Sequence
  Synthetic
  misc_feature (1)..(1): n is 5-(N-benzylcarboxyamide)-2'-deoxyuridine
  misc_feature (2)..(2): n is 5-[N-(3,4-methylenedioxyphenyl-methyl)carboxyamide]-2'-deoxyuridi ne
  misc_feature (3)..(3): n is 2'-O-methyl-adenosine
  misc_feature (5)..(5): n is hexaethylene glycol
  misc_feature (7)..(7): n is 5-(N-benzylcarboxyamide)-2'-O-methyl-uridine
  misc_feature (8)..(8): n is 5-(N-benzylcarboxyamide)-2'-deoxyuridine
  misc_feature (11)..(11): n is 1,3-propane diol
  misc_feature (12)..(12): n is 2'-O-methyl-cytidine
  misc_feature (16)..(17): n is 5-(N-benzylcarboxyamide)-2'-deoxyuridine
  misc_feature (18)..(18): n is 5-(N-benzylcarboxyamide)-2'-O-methyl-uridine
  misc_feature (19)..(19): n is 2'-O-methyl-adenosine
  misc_feature (20)..(20): n is 5-(N-benzylcarboxyamide)-2'-deoxyuridine
  misc_feature (21)..(21): n is 2'-O-methyl-adenosine
  misc_feature (24)..(24): n is 2'-O-methyl-guanosine
  misc_feature (25)..(25): n is hexaethylene glycol
  misc_feature (26)..(26): n is 5-(N-benzylcarboxyamide)-2'-deoxyuridine
  misc_feature (27)..(27): n is 5-[N-(3,4-methylenedioxyphenyl-methyl)carboxyamide]-2'-deoxyuridi ne
  misc_feature (28)..(28): n is 2'-O-methyl-adenosine
  misc_feature (30)..(30): n is hexaethylene glycol
  misc_feature (32)..(32): n is 5-(N-benzylcarboxyamide)-2'-O-methyl-uridine
  misc_feature (33)..(33): n is 5-(N-benzylcarboxyamide)-2'-deoxyuridine
  misc_feature (36)..(36): n is 1,3-propane diol
  misc_feature (37)..(37): n is 2'-O-methyl-cytidine
  misc_feature (41)..(42): n is 5-(N-benzylcarboxyamide)-2'-deoxyuridine
  misc_feature (43)..(43): n is 5-(N-benzylcarboxyamide)-2'-O-methyl-uridine
  misc_feature (44)..(44): n is 2'-O-methyl-adenosine
  misc_feature (45)..(45): n is 5-(N-benzylcarboxyamide)-2'-deoxyuridine
  misc_feature (46)..(46): n is 2'-O-methyl-adenosine
  misc_feature (49)..(49): n is 2'-O-methyl-guanosine
nnncngnnacnngcgnnnnnngcnnnnncngnnacnngcgnnnnnngcn

SEQ ID NO: 709 - DNA, 50 bp, Artificial Sequence
  Synthetic
  misc_feature (1)..(1): n is 5-(N-benzylcarboxyamide)-2'-deoxyuridine
  misc_feature (2)..(2): n is 5-[N-(3,4-methylenedioxyphenyl-methyl)carboxyamide]-2'-deoxyuridi ne
  misc_feature (3)..(3): n is 2'-O-methyl-adenosine
  misc_feature (5)..(5): n is hexaethylene glycol
  misc_feature (7)..(7): n is 5-(N-benzylcarboxyamide)-2'-O-methyl-uridine
  misc_feature (8)..(8): n is 5-(N-benzylcarboxyamide)-2'-deoxyuridine
  misc_feature (11)..(11): n is 1,3-propane diol
  misc_feature (12)..(12): n is 2'-O-methyl-cytidine
  misc_feature (16)..(17): n is 5-(N-benzylcarboxyamide)-2'-deoxyuridine
  misc_feature (18)..(18): n is 5-(N-benzylcarboxyamide)-2'-O-methyl-uridine
  misc_feature (19)..(19): n is 2'-O-methyl-adenosine
  misc_feature (20)..(20): n is 5-(N-benzylcarboxyamide)-2'-deoxyuridine
  misc_feature (21)..(21): n is 2'-O-methyl-adenosine
  misc_feature (24)..(24): n is 2'-O-methyl-guanosine
  misc_feature (25)..(26): n is hexaethylene glycol
  misc_feature (27)..(27): n is 5-(N-benzylcarboxyamide)-2'-deoxyuridine
  misc_feature (28)..(28): n is 5-[N-(3,4-methylenedioxyphenyl-methyl)carboxyamide]-2'-deoxyuridi ne
  misc_feature (29)..(29): n is 2'-O-methyl-adenosine
  misc_feature (31)..(31): n is hexaethylene glycol
  misc_feature (33)..(33): n is 5-(N-benzylcarboxyamide)-2'-O-methyl-uridine
  misc_feature (34)..(34): n is 5-(N-benzylcarboxyamide)-2'-deoxyuridine
  misc_feature (37)..(37): n is 1,3-propane diol
  misc_feature (38)..(38): n is 2'-O-methyl-cytidine
  misc_feature (42)..(43): n is 5-(N-benzylcarboxyamide)-2'-deoxyuridine
  misc_feature (44)..(44): n is 5-(N-benzylcarboxyamide)-2'-O-methyl-uridine
  misc_feature (45)..(45): n is 2'-O-methyl-adenosine
  misc_feature (46)..(46): n is 5-(N-benzylcarboxyamide)-2'-deoxyuridine
  misc_feature (47)..(47): n is 2'-O-methyl-adenosine
  misc_feature (50)..(50): n is 2'-O-methyl-guanosine
nnncngnnacnngcgnnnnnngcnnnnnncngnnacnngcgnnnnnngcn

SEQ ID NO: 710 - DNA, 51 bp, Artificial Sequence
  Synthetic
  misc_feature (1)..(1): n is 5-(N-benzylcarboxyamide)-2'-deoxyuridine
  misc_feature (2)..(2): n is 5-[N-(3,4-methylenedioxyphenyl-methyl)carboxyamide]-2'-deoxyuridi ne
  misc_feature (3)..(3): n is 2'-O-methyl-adenosine
  misc_feature (5)..(5): n is hexaethylene glycol
  misc_feature (7)..(7): n is 5-(N-benzylcarboxyamide)-2'-O-methyl-uridine
  misc_feature (8)..(8): n is 5-(N-benzylcarboxyamide)-2'-deoxyuridine
  misc_feature (11)..(11): n is 1,3-propane diol
  misc_feature (12)..(12): n is 2'-O-methyl-cytidine
  misc_feature (16)..(17): n is 5-(N-benzylcarboxyamide)-2'-deoxyuridine
  misc_feature (18)..(18): n is 5-(N-benzylcarboxyamide)-2'-O-methyl-uridine
  misc_feature (19)..(19): n is 2'-O-methyl-adenosine
  misc_feature (20)..(20): n is 5-(N-benzylcarboxyamide)-2'-deoxyuridine
  misc_feature (21)..(21): n is 2'-O-methyl-adenosine
  misc_feature (24)..(24): n is 2'-O-methyl-guanosine
  misc_feature (25)..(27): n is hexaethylene glycol
  misc_feature (28)..(28): n is 5-(N-benzylcarboxyamide)-2'-deoxyuridine
  misc_feature (29)..(29): n is 5-[N-(3,4-methylenedioxyphenyl-methyl)carboxyamide]-2'-deoxyuridi ne
  misc_feature (30)..(30): n is 2'-O-methyl-adenosine
  misc_feature (32)..(32): n is hexaethylene glycol
  misc_feature (34)..(34): n is 5-(N-benzylcarboxyamide)-2'-O-methyl-uridine
  misc_feature (35)..(35): n is 5-(N-benzylcarboxyamide)-2'-deoxyuridine
  misc_feature (38)..(38): n is 1,3-propane diol
  misc_feature (39)..(39): n is 2'-O-methyl-cytidine
  misc_feature (43)..(44): n is 5-(N-benzylcarboxyamide)-2'-deoxyuridine
  misc_feature (45)..(45): n is 5-(N-benzylcarboxyamide)-2'-O-methyl-uridine
  misc_feature (46)..(46): n is 2'-O-methyl-adenosine
  misc_feature (47)..(47): n is 5-(N-benzylcarboxyamide)-2'-deoxyuridine
  misc_feature (48)..(48): n is 2'-O-methyl-adenosine
  misc_feature (51)..(51): n is 2'-O-methyl-guanosine
nnncngnnacnngcgnnnnnngcnnnnnnncngnnacnngcgnnnnnngcn

SEQ ID NO: 711 - DNA, 52 bp, Artificial Sequence
  Synthetic
  misc_feature (1)..(1): n is 5-(N-benzylcarboxyamide)-2'-deoxyuridine
  misc_feature (2)..(2): n is 5-[N-(3,4-methylenedioxyphenyl-methyl)carboxyamide]-2'-deoxyuridi ne
  misc_feature (3)..(3): n is 2'-O-methyl-adenosine
  misc_feature (5)..(5): n is hexaethylene glycol
  misc_feature (7)..(7): n is 5-(N-benzylcarboxyamide)-2'-O-methyl-uridine
  misc_feature (8)..(8): n is 5-(N-benzylcarboxyamide)-2'-deoxyuridine
  misc_feature (11)..(11): n is 1,3-propane diol
  misc_feature (12)..(12): n is 2'-O-methyl-cytidine
  misc_feature (16)..(17): n is 5-(N-benzylcarboxyamide)-2'-deoxyuridine
  misc_feature (18)..(18): n is 5-(N-benzylcarboxyamide)-2'-O-methyl-uridine
  misc_feature (19)..(19): n is 2'-O-methyl-adenosine
  misc_feature (20)..(20): n is 5-(N-benzylcarboxyamide)-2'-deoxyuridine
  misc_feature (21)..(21): n is 2'-O-methyl-adenosine
  misc_feature (24)..(24): n is 2'-O-methyl-guanosine
  misc_feature (25)..(28): n is hexaethylene glycol
  misc_feature (29)..(29): n is 5-(N-benzylcarboxyamide)-2'-deoxyuridine
  misc_feature (30)..(30): n is 5-[N-(3,4-methylenedioxyphenyl-methyl)carboxyamide]-2'-deoxyuridi ne
  misc_feature (31)..(31): n is 2'-O-methyl-adenosine
  misc_feature (33)..(33): n is hexaethylene glycol
  misc_feature (35)..(35): n is 5-(N-benzylcarboxyamide)-2'-O-methyl-uridine
  misc_feature (36)..(36): n is 5-(N-benzylcarboxyamide)-2'-deoxyuridine
  misc_feature (39)..(39): n is 1,3-propane diol
  misc_feature (40)..(40): n is 2'-O-methyl-cytidine
  misc_feature (44)..(45): n is 5-(N-benzylcarboxyamide)-2'-deoxyuridine
  misc_feature (46)..(46): n is 5-(N-benzylcarboxyamide)-2'-O-methyl-uridine
  misc_feature (47)..(47): n is 2'-O-methyl-adenosine
  misc_feature (48)..(48): n is 5-(N-benzylcarboxyamide)-2'-deoxyuridine
  misc_feature (49)..(49): n is 2'-O-methyl-adenosine
  misc_feature (52)..(52): n is 2'-O-methyl-guanosine
nnncngnnacnngcgnnnnnngcnnnnnnnncngnnacnngcgnnnnnngcn

SEQ ID NO: 712 - DNA, 53 bp, Artificial Sequence
  Synthetic
  misc_feature (1)..(1): n is 5-(N-benzylcarboxyamide)-2'-deoxyuridine
  misc_feature (2)..(2): n is 5-[N-(3,4-methylenedioxyphenyl-methyl)carboxyamide]-2'-deoxyuridi ne
  misc_feature (3)..(3): n is 2'-O-methyl-adenosine
  misc_feature (5)..(5): n is hexaethylene glycol
  misc_feature (7)..(7): n is 5-(N-benzylcarboxyamide)-2'-O-methyl-uridine
  misc_feature (8)..(8): n is 5-(N-benzylcarboxyamide)-2'-deoxyuridine
  misc_feature (11)..(11): n is 1,3-propane diol
  misc_feature (12)..(12): n is 2'-O-methyl-cytidine
  misc_feature (16)..(17): n is 5-(N-benzylcarboxyamide)-2'-deoxyuridine
  misc_feature (18)..(18): n is 5-(N-benzylcarboxyamide)-2'-O-methyl-uridine
  misc_feature (19)..(19): n is 2'-O-methyl-adenosine
  misc_feature (20)..(20): n is 5-(N-benzylcarboxyamide)-2'-deoxyuridine
  misc_feature (21)..(21): n is 2'-O-methyl-adenosine
  misc_feature (24)..(24): n is 2'-O-methyl-guanosine
  misc_feature (25)..(29): n is hexaethylene glycol
  misc_feature (30)..(30): n is 5-(N-benzylcarboxyamide)-2'-deoxyuridine
  misc_feature (31)..(31): n is 5-[N-(3,4-methylenedioxyphenyl-methyl)carboxyamide]-2'-deoxyuridi ne
  misc_feature (32)..(32): n is 2'-O-methyl-adenosine
  misc_feature (34)..(34): n is hexaethylene glycol
  misc_feature (36)..(36): n is 5-(N-benzylcarboxyamide)-2'-O-methyl-uridine
  misc_feature (37)..(37): n is 5-(N-benzylcarboxyamide)-2'-deoxyuridine
  misc_feature (40)..(40): n is 1,3-propane diol
  misc_feature (41)..(41): n is 2'-O-methyl-cytidine
  misc_feature (45)..(46): n is 5-(N-benzylcarboxyamide)-2'-deoxyuridine
  misc_feature (47)..(47): n is 5-(N-benzylcarboxyamide)-2'-O-methyl-uridine
  misc_feature (48)..(48): n is 2'-O-methyl-adenosine
  misc_feature (49)..(49): n is 5-(N-benzylcarboxyamide)-2'-deoxyuridine
  misc_feature (50)..(50): n is 2'-O-methyl-adenosine
  misc_feature (53)..(53): n is 2'-O-methyl-guanosine
nnncngnnacnngcgnnnnnngcnnnnnnnnncngnnacnngcgnnnnnngcn

SEQ ID NO: 713 - DNA, 54 bp, Artificial Sequence
  Synthetic
  misc_feature (1)..(1): n is 5-(N-benzylcarboxyamide)-2'-deoxyuridine
  misc_feature (2)..(2): n is 5-[N-(3,4-methylenedioxyphenyl-methyl)carboxyamide]-2'-deoxyuridi ne
  misc_feature (3)..(3): n is 2'-O-methyl-adenosine
  misc_feature (5)..(5): n is hexaethylene glycol
  misc_feature (7)..(7): n is 5-(N-benzylcarboxyamide)-2'-O-methyl-uridine
  misc_feature (8)..(8): n is 5-(N-benzylcarboxyamide)-2'-deoxyuridine
  misc_feature (11)..(11): n is 1,3-propane diol
  misc_feature (12)..(12): n is 2'-O-methyl-cytidine
  misc_feature (16)..(17): n is 5-(N-benzylcarboxyamide)-2'-deoxyuridine
  misc_feature (18)..(18): n is 5-(N-benzylcarboxyamide)-2'-O-methyl-uridine
  misc_feature (19)..(19): n is 2'-O-methyl-adenosine
  misc_feature (20)..(20): n is 5-(N-benzylcarboxyamide)-2'-deoxyuridine
  misc_feature (21)..(21): n is 2'-O-methyl-adenosine
  misc_feature (24)..(24): n is 2'-O-methyl-guanosine
  misc_feature (25)..(30): n is hexaethylene glycol
  misc_feature (31)..(31): n is 5-(N-benzylcarboxyamide)-2'-deoxyuridine
  misc_feature (32)..(32): n is 5-[N-(3,4-methylenedioxyphenyl-methyl)carboxyamide]-2'-deoxyuridi ne
  misc_feature (33)..(33): n is 2'-O-methyl-adenosine
  misc_feature (35)..(35): n is hexaethylene glycol
  misc_feature (37)..(37): n is 5-(N-benzylcarboxyamide)-2'-O-methyl-uridine
  misc_feature (38)..(38): n is 5-(N-benzylcarboxyamide)-2'-deoxyuridine
  misc_feature (41)..(41): n is 1,3-propane diol
  misc_feature (42)..(42): n is 2'-O-methyl-cytidine
  misc_feature (46)..(47): n is 5-(N-benzylcarboxyamide)-2'-deoxyuridine
  misc_feature (48)..(48): n is 5-(N-benzylcarboxyamide)-2'-O-methyl-uridine
  misc_feature (49)..(49): n is 2'-O-methyl-adenosine
  misc_feature (50)..(50): n is 5-(N-benzylcarboxyamide)-2'-deoxyuridine
  misc_feature (51)..(51): n is 2'-O-methyl-adenosine
  misc_feature (54)..(54): n is 2'-O-methyl-guanosine
nnncngnnacnngcgnnnnnngcnnnnnnnnnncngnnacnngcgnnnnnngcn

SEQ ID NO: 714 - DNA, 48 bp, Artificial Sequence
  Synthetic
  misc_feature (1)..(1): n is 5-(N-benzylcarboxyamide)-2'-deoxyuridine
  misc_feature (2)..(2): n is 5-[N-(3,4-methylenedioxyphenyl-methyl)carboxyamide]-2'-deoxyuridi ne
  misc_feature (3)..(3): n is 2'-O-methyl-adenosine
  misc_feature (5)..(5): n is hexaethylene glycol
  misc_feature (7)..(7): n is 5-(N-benzylcarboxyamide)-2'-O-methyl-uridine
  misc_feature (8)..(8): n is 5-(N-benzylcarboxyamide)-2'-deoxyuridine
  misc_feature (11)..(11): n is 1,3-propane diol
  misc_feature (12)..(12): n is 2'-O-methyl-cytidine
  misc_feature (16)..(17): n is 5-(N-benzylcarboxyamide)-2'-deoxyuridine
  misc_feature (18)..(18): n is 5-(N-benzylcarboxyamide)-2'-O-methyl-uridine
  misc_feature (19)..(19): n is 2'-O-methyl-adenosine
  misc_feature (20)..(20): n is 5-(N-benzylcarboxyamide)-2'-deoxyuridine
  misc_feature (21)..(21): n is 2'-O-methyl-adenosine
  misc_feature (24)..(25): n is 2'-O-methyl-guanosine
  misc_feature (28)..(28): n is 2'-O-methyl-adenosine
  misc_feature (29)..(29): n is 5-(N-benzylcarboxyamide)-2'-deoxyuridine
  misc_feature (30)..(30): n is 2'-O-methyl-adenosine
  misc_feature (31)..(31): n is 5-(N-benzylcarboxyamide)-2'-O-methyl-uridine
  misc_feature (32)..(33): n is 5-(N-benzylcarboxyamide)-2'-deoxyuridine
  misc_feature (37)..(37): n is 2'-O-methyl-cytidine
  misc_feature (38)..(38): n is 1,3-propane diol
  misc_feature (41)..(41): n is 5-(N-benzylcarboxyamide)-2'-deoxyuridine
  misc_feature (42)..(42): n is 5-(N-benzylcarboxyamide)-2'-O-methyl-uridine
  misc_feature (44)..(44): n is hexaethylene glycol
  misc_feature (46)..(46): n is 2'-O-methyl-adenosine
  misc_feature (47)..(47): n is 5-[N-(3,4-methylenedioxyphenyl-methyl)carboxyamide]-2'-deoxyuridi ne
  misc_feature (48)..(48): n is 5-(N-benzylcarboxyamide)-2'-deoxyuridine
nnncngnnacnngcgnnnnnngcnncgnnnnnngcgnncanngncnnn

SEQ ID NO: 715 - DNA, 50 bp, Artificial Sequence
  Synthetic
  misc_feature (1)..(1): n is 5-(N-benzylcarboxyamide)-2'-deoxyuridine
  misc_feature (2)..(2): n is 5-[N-(3,4-methylenedioxyphenyl-methyl)carboxyamide]-2'-deoxyuridi ne
  misc_feature (3)..(3): n is 2'-O-methyl-adenosine
  misc_feature (5)..(5): n is hexaethylene glycol
  misc_feature (7)..(7): n is 5-(N-benzylcarboxyamide)-2'-O-methyl-uridine
  misc_feature (8)..(8): n is 5-(N-benzylcarboxyamide)-2'-deoxyuridine
  misc_feature (11)..(11): n is 1,3-propane diol
  misc_feature (12)..(12): n is 2'-O-methyl-cytidine
  misc_feature (16)..(17): n is 5-(N-benzylcarboxyamide)-2'-deoxyuridine
  misc_feature (18)..(18): n is 5-(N-benzylcarboxyamide)-2'-O-methyl-uridine
  misc_feature (19)..(19): n is 2'-O-methyl-adenosine
  misc_feature (20)..(20): n is 5-(N-benzylcarboxyamide)-2'-deoxyuridine
  misc_feature (21)..(21): n is 2'-O-methyl-adenosine
  misc_feature (24)..(24): n is 2'-O-methyl-guanosine
  misc_feature (25)..(26): n is hexaethylene glycol
  misc_feature (27)..(27): n is 2'-O-methyl-guanosine
  misc_feature (30)..(30): n is 2'-O-methyl-adenosine
  misc_feature (31)..(31): n is 5-(N-benzylcarboxyamide)-2'-deoxyuridine
  misc_feature (32)..(32): n is 2'-O-methyl-adenosine
  misc_feature (33)..(33): n is 5-(N-benzylcarboxyamide)-2'-O-methyl-uridine
  misc_feature (34)..(35): n is 5-(N-benzylcarboxyamide)-2'-deoxyuridine
  misc_feature (39)..(39): n is 2'-O-methyl-cytidine
  misc_feature (40)..(40): n is 1,3-propane diol
  misc_feature (43)..(43): n is 5-(N-benzylcarboxyamide)-2'-deoxyuridine
  misc_feature (44)..(44): n is 5-(N-benzylcarboxyamide)-2'-O-methyl-uridine
  misc_feature (46)..(46): n is hexaethylene glycol
  misc_feature (48)..(48): n is 2'-O-methyl-adenosine
  misc_feature (49)..(49): n is 5-[N-(3,4-methylenedioxyphenyl-methyl)carboxyamide]-2'-deoxyuridi ne
  misc_feature (50)..(50): n is 5-(N-benzylcarboxyamide)-2'-deoxyuridine
nnncngnnacnngcgnnnnnngcnnnncgnnnnnngcgnncanngncnnn

SEQ ID NO: 716 - DNA, 52 bp, Artificial Sequence
  Synthetic
  misc_feature (1)..(1): n is 5-(N-benzylcarboxyamide)-2'-deoxyuridine
  misc_feature (2)..(2): n is 5-[N-(3,4-methylenedioxyphenyl-methyl)carboxyamide]-2'-deoxyuridi ne
  misc_feature (3)..(3): n is 2'-O-methyl-adenosine
  misc_feature (5)..(5): n is hexaethylene glycol
  misc_feature (7)..(7): n is 5-(N-benzylcarboxyamide)-2'-O-methyl-uridine
  misc_feature (8)..(8): n is 5-(N-benzylcarboxyamide)-2'-deoxyuridine
  misc_feature (11)..(11): n is 1,3-propane diol
  misc_feature (12)..(12): n is 2'-O-methyl-cytidine
  misc_feature (16)..(17): n is 5-(N-benzylcarboxyamide)-2'-deoxyuridine
  misc_feature (18)..(18): n is 5-(N-benzylcarboxyamide)-2'-O-methyl-uridine
  misc_feature (19)..(19): n is 2'-O-methyl-adenosine
  misc_feature (20)..(20): n is 5-(N-benzylcarboxyamide)-2'-deoxyuridine
  misc_feature (21)..(21): n is 2'-O-methyl-adenosine
  misc_feature (24)..(24): n is 2'-O-methyl-guanosine
  misc_feature (25)..(28): n is hexaethylene glycol
  misc_feature (29)..(29): n is 2'-O-methyl-guanosine
  misc_feature (32)..(32): n is 2'-O-methyl-adenosine
  misc_feature (33)..(33): n is 5-(N-benzylcarboxyamide)-2'-deoxyuridine
  misc_feature (34)..(34): n is 2'-O-methyl-adenosine
  misc_feature (35)..(35): n is 5-(N-benzylcarboxyamide)-2'-O-methyl-uridine
  misc_feature (36)..(37): n is 5-(N-benzylcarboxyamide)-2'-deoxyuridine
  misc_feature (41)..(41): n is 2'-O-methyl-cytidine
  misc_feature (42)..(42): n is 1,3-propane diol
  misc_feature (45)..(45): n is 5-(N-benzylcarboxyamide)-2'-deoxyuridine
  misc_feature (46)..(46): n is 5-(N-benzylcarboxyamide)-2'-O-methyl-uridine
  misc_feature (48)..(48): n is hexaethylene glycol
  misc_feature (50)..(50): n is 2'-O-methyl-adenosine
  misc_feature (51)..(51): n is 5-[N-(3,4-methylenedioxyphenyl-methyl)carboxyamide]-2'-deoxyuridi ne
  misc_feature (52)..(52): n is 5-(N-benzylcarboxyamide)-2'-deoxyuridine
nnncngnnacnngcgnnnnnngcnnnnnncgnnnnnngcgnncanngncnnn

SEQ ID NO: 717 - DNA, 54 bp, Artificial Sequence
  Synthetic
  misc_feature (1)..(1): n is 5-(N-benzylcarboxyamide)-2'-deoxyuridine
  misc_feature (2)..(2): n is 5-[N-(3,4-methylenedioxyphenyl-methyl)carboxyamide]-2'-deoxyuridi ne
  misc_feature (3)..(3): n is 2'-O-methyl-adenosine
  misc_feature (5)..(5): n is hexaethylene glycol
  misc_feature (7)..(7): n is 5-(N-benzylcarboxyamide)-2'-O-methyl-uridine
  misc_feature (8)..(8): n is 5-(N-benzylcarboxyamide)-2'-deoxyuridine
  misc_feature (11)..(11): n is 1,3-propane diol
  misc_feature (12)..(12): n is 2'-O-methyl-cytidine
  misc_feature (16)..(17): n is 5-(N-benzylcarboxyamide)-2'-deoxyuridine
  misc_feature (18)..(18): n is 5-(N-benzylcarboxyamide)-2'-O-methyl-uridine
  misc_feature (19)..(19): n is 2'-O-methyl-adenosine
  misc_feature (20)..(20): n is 5-(N-benzylcarboxyamide)-2'-deoxyuridine
  misc_feature (21)..(21): n is 2'-O-methyl-adenosine
  misc_feature (24)..(24): n is 2'-O-methyl-guanosine
  misc_feature (25)..(30): n is hexaethylene glycol
  misc_feature (31)..(31): n is 2'-O-methyl-guanosine
  misc_feature (34)..(34): n is 2'-O-methyl-adenosine
  misc_feature (35)..(35): n is 5-(N-benzylcarboxyamide)-2'-deoxyuridine
  misc_feature (36)..(36): n is 2'-O-methyl-adenosine
  misc_feature (37)..(37): n is 5-(N-benzylcarboxyamide)-2'-O-methyl-uridine
  misc_feature (38)..(39): n is 5-(N-benzylcarboxyamide)-2'-deoxyuridine
  misc_feature (43)..(43): n is 2'-O-methyl-cytidine
  misc_feature (44)..(44): n is 1,3-propane diol
  misc_feature (47)..(47): n is 5-(N-benzylcarboxyamide)-2'-deoxyuridine
  misc_feature (48)..(48): n is 5-(N-benzylcarboxyamide)-2'-O-methyl-uridine
  misc_feature (50)..(50): n is hexaethylene glycol
  misc_feature (52)..(52): n is 2'-O-methyl-adenosine
  misc_feature (53)..(53): n is 5-[N-(3,4-methylenedioxyphenyl-methyl)carboxyamide]-2'-deoxyuridi ne
  misc_feature (54)..(54): n is 5-(N-benzylcarboxyamide)-2'-deoxyuridine
nnncngnnacnngcgnnnnnngcnnnnnnnncgnnnnnngcgnncanngncnnn

SEQ ID NO: 718 - DNA, 42 bp, Artificial Sequence
  Synthetic
  misc_feature (9)..(9): n is 5-[N-(1-naphthylmethyl)carboxyamide]-2'-deoxyuridine
  misc_feature (11)..(11): n is 5-[N-(1-naphthylmethyl)carboxyamide]-2'-deoxyuridine
  misc_feature (13)..(13): n is 5-[N-(1-naphthylmethyl)carboxyamide]-2'-deoxyuridine
  misc_feature (19)..(19): n is 5-[N-(1-naphthylmethyl)carboxyamide]-2'-deoxyuridine
  misc_feature (21)..(21): n is 5-[N-(1-naphthylmethyl)carboxyamide]-2'-deoxyuridine
  misc_feature (30)..(30): n is 5-[N-(1-naphthylmethyl)carboxyamide]-2'-deoxyuridine
  misc_feature (32)..(32): n is 5-[N-(1-naphthylmethyl)carboxyamide]-2'-deoxyuridine
  misc_feature (34)..(34): n is 5-[N-(1-naphthylmethyl)carboxyamide]-2'-deoxyuridine
  misc_feature (40)..(40): n is 5-[N-(1-naphthylmethyl)carboxyamide]-2'-deoxyuridine
  misc_feature (42)..(42): n is 5-[N-(1-naphthylmethyl)carboxyamide]-2'-deoxyuridine
cgacagcangnangcacancncgacagcangnangcacancn

SEQ ID NO: 719 - DNA, 43 bp, Artificial Sequence
  Synthetic
  misc_feature (9)..(9): n is 5-[N-(1-naphthylmethyl)carboxyamide]-2'-deoxyuridine
  misc_feature (11)..(11): n is 5-[N-(1-naphthylmethyl)carboxyamide]-2'-deoxyuridine
  misc_feature (13)..(13): n is 5-[N-(1-naphthylmethyl)carboxyamide]-2'-deoxyuridine
  misc_feature (19)..(19): n is 5-[N-(1-naphthylmethyl)carboxyamide]-2'-deoxyuridine
  misc_feature (21)..(21): n is 5-[N-(1-naphthylmethyl)carboxyamide]-2'-deoxyuridine
  misc_feature (22)..(22): n is hexaethylene glycol
  misc_feature (31)..(31): n is 5-[N-(1-naphthylmethyl)carboxyamide]-2'-deoxyuridine
  misc_feature (33)..(33): n is 5-[N-(1-naphthylmethyl)carboxyamide]-2'-deoxyuridine
  misc_feature (35)..(35): n is 5-[N-(1-naphthylmethyl)carboxyamide]-2'-deoxyuridine
  misc_feature (41)..(41): n is 5-[N-(1-naphthylmethyl)carboxyamide]-2'-deoxyuridine
  misc_feature (43)..(43): n is 5-[N-(1-naphthylmethyl)carboxyamide]-2'-deoxyuridine
cgacagcangnangcacancnncgacagcangnangcacancn

SEQ ID NO: 720 - DNA, 44 bp, Artificial Sequence
  Synthetic
  misc_feature (9)..(9): n is 5-[N-(1-naphthylmethyl)carboxyamide]-2'-deoxyuridine
  misc_feature (11)..(11): n is 5-[N-(1-naphthylmethyl)carboxyamide]-2'-deoxyuridine
  misc_feature (13)..(13): n is 5-[N-(1-naphthylmethyl)carboxyamide]-2'-deoxyuridine
  misc_feature (19)..(19): n is 5-[N-(1-naphthylmethyl)carboxyamide]-2'-deoxyuridine
  misc_feature (21)..(21): n is 5-[N-(1-naphthylmethyl)carboxyamide]-2'-deoxyuridine
  misc_feature (22)..(23): n is hexaethylene glycol
  misc_feature (32)..(32): n is 5-[N-(1-naphthylmethyl)carboxyamide]-2'-deoxyuridine
  misc_feature (34)..(34): n is 5-[N-(1-naphthylmethyl)carboxyamide]-2'-deoxyuridine
  misc_feature (36)..(36): n is 5-[N-(1-naphthylmethyl)carboxyamide]-2'-deoxyuridine
  misc_feature (42)..(42): n is 5-[N-(1-naphthylmethyl)carboxyamide]-2'-deoxyuridine
  misc_feature (44)..(44): n is 5-[N-(1-naphthylmethyl)carboxyamide]-2'-deoxyuridine
cgacagcangnangcacancnnncgacagcangnangcacancn

SEQ ID NO: 721 - DNA, 45 bp, Artificial Sequence
  Synthetic
  misc_feature (9)..(9): n is 5-[N-(1-naphthylmethyl)carboxyamide]-2'-deoxyuridine
  misc_feature (11)..(11): n is 5-[N-(1-naphthylmethyl)carboxyamide]-2'-deoxyuridine
  misc_feature (13)..(13): n is 5-[N-(1-naphthylmethyl)carboxyamide]-2'-deoxyuridine
  misc_feature (19)..(19): n is 5-[N-(1-naphthylmethyl)carboxyamide]-2'-deoxyuridine
  misc_feature (21)..(21): n is 5-[N-(1-naphthylmethyl)carboxyamide]-2'-deoxyuridine
  misc_feature (22)..(24): n is hexaethylene glycol
  misc_feature (33)..(33): n is 5-[N-(1-naphthylmethyl)carboxyamide]-2'-deoxyuridine
  misc_feature (35)..(35): n is 5-[N-(1-naphthylmethyl)carboxyamide]-2'-deoxyuridine
  misc_feature (37)..(37): n is 5-[N-(1-naphthylmethyl)carboxyamide]-2'-deoxyuridine
  misc_feature (43)..(43): n is 5-[N-(1-naphthylmethyl)carboxyamide]-2'-deoxyuridine
  misc_feature (45)..(45): n is 5-[N-(1-naphthylmethyl)carboxyamide]-2'-deoxyuridine
cgacagcangnangcacancnnnncgacagcangnangcacancn

SEQ ID NO: 722 - DNA, 46 bp, Artificial Sequence
  Synthetic
  misc_feature (9)..(9): n is 5-[N-(1-naphthylmethyl)carboxyamide]-2'-deoxyuridine
  misc_feature (11)..(11): n is 5-[N-(1-naphthylmethyl)carboxyamide]-2'-deoxyuridine
  misc_feature (13)..(13): n is 5-[N-(1-naphthylmethyl)carboxyamide]-2'-deoxyuridine
  misc_feature (19)..(19): n is 5-[N-(1-naphthylmethyl)carboxyamide]-2'-deoxyuridine
  misc_feature (21)..(21): n is 5-[N-(1-naphthylmethyl)carboxyamide]-2'-deoxyuridine
  misc_feature (22)..(25): n is hexaethylene glycol
  misc_feature (34)..(34): n is 5-[N-(1-naphthylmethyl)carboxyamide]-2'-deoxyuridine
  misc_feature (36)..(36): n is 5-[N-(1-naphthylmethyl)carboxyamide]-2'-deoxyuridine
  misc_feature (38)..(38): n is 5-[N-(1-naphthylmethyl)carboxyamide]-2'-deoxyuridine
  misc_feature (44)..(44): n is 5-[N-(1-naphthylmethyl)carboxyamide]-2'-deoxyuridine
  misc_feature (46)..(46): n is 5-[N-(1-naphthylmethyl)carboxyamide]-2'-deoxyuridine
cgacagcangnangcacancnnnnncgacagcangnangcacancn

SEQ ID NO: 723 - DNA, 47 bp, Artificial Sequence
  Synthetic
  misc_feature (9)..(9): n is 5-[N-(1-naphthylmethyl)carboxyamide]-2'-deoxyuridine
  misc_feature (11)..(11): n is 5-[N-(1-naphthylmethyl)carboxyamide]-2'-deoxyuridine
  misc_feature (13)..(13): n is 5-[N-(1-naphthylmethyl)carboxyamide]-2'-deoxyuridine
  misc_feature (19)..(19): n is 5-[N-(1-naphthylmethyl)carboxyamide]-2'-deoxyuridine
  misc_feature (21)..(21): n is 5-[N-(1-naphthylmethyl)carboxyamide]-2'-deoxyuridine
  misc_feature (22)..(26): n is hexaethylene glycol
  misc_feature (35)..(35): n is 5-[N-(1-naphthylmethyl)carboxyamide]-2'-deoxyuridine
  misc_feature (37)..(37): n is 5-[N-(1-naphthylmethyl)carboxyamide]-2'-deoxyuridine
  misc_feature (39)..(39): n is 5-[N-(1-naphthylmethyl)carboxyamide]-2'-deoxyuridine
  misc_feature (45)..(45): n is 5-[N-(1-naphthylmethyl)carboxyamide]-2'-deoxyuridine
  misc_feature (47)..(47): n is 5-[N-(1-naphthylmethyl)carboxyamide]-2'-deoxyuridine
cgacagcangnangcacancnnnnnncgacagcangnangcacancn

SEQ ID NO: 724 - DNA, 48 bp, Artificial Sequence
  Synthetic
  misc_feature (9)..(9): n is 5-[N-(1-naphthylmethyl)carboxyamide]-2'-deoxyuridine
  misc_feature (11)..(11): n is 5-[N-(1-naphthylmethyl)carboxyamide]-2'-deoxyuridine
  misc_feature (13)..(13): n is 5-[N-(1-naphthylmethyl)carboxyamide]-2'-deoxyuridine
  misc_feature (19)..(19): n is 5-[N-(1-naphthylmethyl)carboxyamide]-2'-deoxyuridine
  misc_feature (21)..(21): n is 5-[N-(1-naphthylmethyl)carboxyamide]-2'-deoxyuridine
  misc_feature (22)..(27): n is hexaethylene glycol
  misc_feature (36)..(36): n is 5-[N-(1-naphthylmethyl)carboxyamide]-2'-deoxyuridine
  misc_feature (38)..(38): n is 5-[N-(1-naphthylmethyl)carboxyamide]-2'-deoxyuridine
  misc_feature (40)..(40): n is 5-[N-(1-naphthylmethyl)carboxyamide]-2'-deoxyuridine
  misc_feature (46)..(46): n is 5-[N-(1-naphthylmethyl)carboxyamide]-2'-deoxyuridine
  misc_feature (48)..(48): n is 5-[N-(1-naphthylmethyl)carboxyamide]-2'-deoxyuridine
cgacagcangnangcacancnnnnnnncgacagcangnangcacancn

SEQ ID NO: 725 - DNA, 42 bp, Artificial Sequence
  Synthetic
  misc_feature (9)..(9): n is 5-[N-(1-naphthylmethyl)carboxyamide]-2'-deoxyuridine
  misc_feature (11)..(11): n is 5-[N-(1-naphthylmethyl)carboxyamide]-2'-deoxyuridine
  misc_feature (13)..(13): n is 5-[N-(1-naphthylmethyl)carboxyamide]-2'-deoxyuridine
  misc_feature (19)..(19): n is 5-[N-(1-naphthylmethyl)carboxyamide]-2'-deoxyuridine
  misc_feature (21)..(22): n is 5-[N-(1-naphthylmethyl)carboxyamide]-2'-deoxyuridine
  misc_feature (24)..(24): n is 5-[N-(1-naphthylmethyl)carboxyamide]-2'-deoxyuridine
  misc_feature (30)..(30): n is 5-[N-(1-naphthylmethyl)carboxyamide]-2'-deoxyuridine
  misc_feature (32)..(32): n is 5-[N-(1-naphthylmethyl)carboxyamide]-2'-deoxyuridine
  misc_feature (34)..(34): n is 5-[N-(1-naphthylmethyl)carboxyamide]-2'-deoxyuridine
cgacagcangnangcacancnncnacacgnangnacgacagc

SEQ ID NO: 726 - DNA, 44 bp, Artificial Sequence
  Synthetic
  misc_feature (9)..(9): n is 5-[N-(1-naphthylmethyl)carboxyamide]-2'-deoxyuridine
  misc_feature (11)..(11): n is 5-[N-(1-naphthylmethyl)carboxyamide]-2'-deoxyuridine
  misc_feature (13)..(13): n is 5-[N-(1-naphthylmethyl)carboxyamide]-2'-deoxyuridine
  misc_feature (19)..(19): n is 5-[N-(1-naphthylmethyl)carboxyamide]-2'-deoxyuridine
  misc_feature (21)..(21): n is 5-[N-(1-naphthylmethyl)carboxyamide]-2'-deoxyuridine
  misc_feature (22)..(23): n is hexaethylene glycol
  misc_feature (24)..(24): n is 5-[N-(1-naphthylmethyl)carboxyamide]-2'-deoxyuridine
  misc_feature (26)..(26): n is 5-[N-(1-naphthylmethyl)carboxyamide]-2'-deoxyuridine
  misc_feature (32)..(32): n is 5-[N-(1-naphthylmethyl)carboxyamide]-2'-deoxyuridine
  misc_feature (34)..(34): n is 5-[N-(1-naphthylmethyl)carboxyamide]-2'-deoxyuridine
  misc_feature (36)..(36): n is 5-[N-(1-naphthylmethyl)carboxyamide]-2'-deoxyuridine
cgacagcangnangcacancnnnncnacacgnangnacgacagc

SEQ ID NO: 727 - DNA, 46 bp, Artificial Sequence
  Synthetic
  misc_feature (9)..(9): n is 5-[N-(1-naphthylmethyl)carboxyamide]-2'-deoxyuridine
  misc_feature (11)..(11): n is 5-[N-(1-naphthylmethyl)carboxyamide]-2'-deoxyuridine
  misc_feature (13)..(13): n is 5-[N-(1-naphthylmethyl)carboxyamide]-2'-deoxyuridine
  misc_feature (19)..(19): n is 5-[N-(1-naphthylmethyl)carboxyamide]-2'-deoxyuridine
  misc_feature (21)..(21): n is 5-[N-(1-naphthylmethyl)carboxyamide]-2'-deoxyuridine
  misc_feature (22)..(25): n is hexaethylene glycol
  misc_feature (26)..(26): n is 5-[N-(1-naphthylmethyl)carboxyamide]-2'-deoxyuridine
  misc_feature (28)..(28): n is 5-[N-(1-naphthylmethyl)carboxyamide]-2'-deoxyuridine
  misc_feature (34)..(34): n is 5-[N-(1-naphthylmethyl)carboxyamide]-2'-deoxyuridine
  misc_feature (36)..(36): n is 5-[N-(1-naphthylmethyl)carboxyamide]-2'-deoxyuridine
  misc_feature (38)..(38): n is 5-[N-(1-naphthylmethyl)carboxyamide]-2'-deoxyuridine
cgacagcangnangcacancnnnnnncnacacgnangnacgacagc

SEQ ID NO: 728 - DNA, 48 bp, Artificial Sequence
  Synthetic
  misc_feature (9)..(9): n is 5-[N-(1-naphthylmethyl)carboxyamide]-2'-deoxyuridine
  misc_feature (11)..(11): n is 5-[N-(1-naphthylmethyl)carboxyamide]-2'-deoxyuridine
  misc_feature (13)..(13): n is 5-[N-(1-naphthylmethyl)carboxyamide]-2'-deoxyuridine
  misc_feature (19)..(19): n is 5-[N-(1-naphthylmethyl)carboxyamide]-2'-deoxyuridine
  misc_feature (21)..(21): n is 5-[N-(1-naphthylmethyl)carboxyamide]-2'-deoxyuridine
  misc_feature (22)..(27): n is hexaethylene glycol
  misc_feature (28)..(28): n is 5-[N-(1-naphthylmethyl)carboxyamide]-2'-deoxyuridine
  misc_feature (30)..(30): n is 5-[N-(1-naphthylmethyl)carboxyamide]-2'-deoxyuridine
  misc_feature (36)..(36): n is 5-[N-(1-naphthylmethyl)carboxyamide]-2'-deoxyuridine
  misc_feature (38)..(38): n is 5-[N-(1-naphthylmethyl)carboxyamide]-2'-deoxyuridine
  misc_feature (40)..(40): n is 5-[N-(1-naphthylmethyl)carboxyamide]-2'-deoxyuridine
cgacagcangnangcacancnnnnnnnncnacacgnangnacgacagc

SEQ ID NO: 729 - DNA, 58 bp, Artificial Sequence
  Synthetic
  misc_feature (4)..(5): n is 5-[N-(1-naphthylmethyl)carboxyamide]-2'-deoxyuridine
  misc_feature (6)..(6): n is 2'-O-methyl-cytidine
  misc_feature (9)..(9): n is 2'-O-methyl-guanosine
  misc_feature (10)..(10): n is 5-[N-(1-naphthylmethyl)carboxyamide]-2'-deoxyuridine
  misc_feature (12)..(12): n is 2'-O-methyl-cytidine
  misc_feature (13)..(14): n is 5-[N-(1-naphthylmethyl)carboxyamide]-2'-deoxyuridine
  misc_feature (15)..(15): n is 2'-O-methyl-guanosine
  misc_feature (16)..(16): n is 5-[N-(1-naphthylmethyl)carboxyamide]-2'-deoxyuridine
  misc_feature (17)..(17): n is 2'-O-methyl-adenosine
  misc_feature (18)..(18): n is 2'-O-methyl-guanosine
  misc_feature (21)..(21): n is 5-[N-(1-naphthylmethyl)carboxyamide]-2'-deoxyuridine
  misc_feature (22)..(22): n is 5-[N-(1-naphthylmethyl)carboxyamide]-2'- O-methyl-uridine
  misc_feature (23)..(23): n is 5-[N-(1-naphthylmethyl)carboxyamide]-2'-deoxyuridine
  misc_feature (27)..(27): n is 5-[N-(1-naphthylmethyl)carboxyamide]-2'-deoxyuridine
  misc_feature (28)..(29): n is 2'-O-methyl-guanosine
  misc_feature (33)..(34): n is 5-[N-(1-naphthylmethyl)carboxyamide]-2'-deoxyuridine
  misc_feature (35)..(35): n is 2'-O-methyl-cytidine
  misc_feature (38)..(38): n is 2'-O-methyl-guanosine
  misc_feature (39)..(39): n is 5-[N-(1-naphthylmethyl)carboxyamide]-2'-deoxyuridine
  misc_feature (41)..(41): n is 2'-O-methyl-cytidine
  misc_feature (42)..(43): n is 5-[N-(1-naphthylmethyl)carboxyamide]-2'-deoxyuridine
  misc_feature (44)..(44): n is 2'-O-methyl-guanosine
  misc_feature (45)..(45): n is 5-[N-(1-naphthylmethyl)carboxyamide]-2'-deoxyuridine
  misc_feature (46)..(46): n is 2'-O-methyl-adenosine
  misc_feature (47)..(47): n is 2'-O-methyl-guanosine
  misc_feature (50)..(50): n is 5-[N-(1-naphthylmethyl)carboxyamide]-2'-deoxyuridine
  misc_feature (51)..(51): n is 5-[N-(1-naphthylmethyl)carboxyamide]-2'- O-methyl-uridine
  misc_feature (52)..(52): n is 5-[N-(1-naphthylmethyl)carboxyamide]-2'-deoxyuridine
  misc_feature (56)..(56): n is 5-[N-(1-naphthylmethyl)carboxyamide]-2'-deoxyuridine
  misc_feature (57)..(58): n is 2'-O-methyl-guanosine
ccgnnnaanngnnnnnnngannnaaannnccgnnnaanngnnnnnnngannnaaannn

SEQ ID NO: 730 - DNA, 59 bp, Artificial Sequence
  Synthetic
  misc_feature (4)..(5): n is 5-[N-(1-naphthylmethyl)carboxyamide]-2'-deoxyuridine
  misc_feature (6)..(6): n is 2'-O-methyl-cytidine
  misc_feature (9)..(9): n is 2'-O-methyl-guanosine
  misc_feature (10)..(10): n is 5-[N-(1-naphthylmethyl)carboxyamide]-2'-deoxyuridine
  misc_feature (12)..(12): n is 2'-O-methyl-cytidine
  misc_feature (13)..(14): n is 5-[N-(1-naphthylmethyl)carboxyamide]-2'-deoxyuridine
  misc_feature (15)..(15): n is 2'-O-methyl-guanosine
  misc_feature (16)..(16): n is 5-[N-(1-naphthylmethyl)carboxyamide]-2'-deoxyuridine
  misc_feature (17)..(17): n is 2'-O-methyl-adenosine
  misc_feature (18)..(18): n is 2'-O-methyl-guanosine
  misc_feature (21)..(21): n is 5-[N-(1-naphthylmethyl)carboxyamide]-2'-deoxyuridine
  misc_feature (22)..(22): n is 5-[N-(1-naphthylmethyl)carboxyamide]-2'- O-methyl-uridine
  misc_feature (23)..(23): n is 5-[N-(1-naphthylmethyl)carboxyamide]-2'-deoxyuridine
  misc_feature (27)..(27): n is 5-[N-(1-naphthylmethyl)carboxyamide]-2'-deoxyuridine
  misc_feature (28)..(29): n is 2'-O-methyl-guanosine
  misc_feature (30)..(30): n is hexaethylene glycol
  misc_feature (34)..(35): n is 5-[N-(1-naphthylmethyl)carboxyamide]-2'-deoxyuridine
  misc_feature (36)..(36): n is 2'-O-methyl-cytidine
  misc_feature (39)..(39): n is 2'-O-methyl-guanosine
  misc_feature (40)..(40): n is 5-[N-(1-naphthylmethyl)carboxyamide]-2'-deoxyuridine
  misc_feature (42)..(42): n is 2'-O-methyl-cytidine
  misc_feature (43)..(44): n is 5-[N-(1-naphthylmethyl)carboxyamide]-2'-deoxyuridine
  misc_feature (45)..(45): n is 2'-O-methyl-guanosine
  misc_feature (46)..(46): n is 5-[N-(1-naphthylmethyl)carboxyamide]-2'-deoxyuridine
  misc_feature (47)..(47): n is 2'-O-methyl-adenosine
  misc_feature (48)..(48): n is 2'-O-methyl-guanosine
  misc_feature (51)..(51): n is 5-[N-(1-naphthylmethyl)carboxyamide]-2'-deoxyuridine
  misc_feature (52)..(52): n is 5-[N-(1-naphthylmethyl)carboxyamide]-2'- O-methyl-uridine
  misc_feature (53)..(53): n is 5-[N-(1-naphthylmethyl)carboxyamide]-2'-deoxyuridine
  misc_feature (57)..(57): n is 5-[N-(1-naphthylmethyl)carboxyamide]-2'-deoxyuridine
  misc_feature (58)..(59): n is 2'-O-methyl-guanosine
ccgnnnaanngnnnnnnngannnaaannnnccgnnnaanngnnnnnnngannnaaannn

SEQ ID NO: 731 - DNA, 60 bp, Artificial Sequence
  Synthetic
  misc_feature (4)..(5): n is 5-[N-(1-naphthylmethyl)carboxyamide]-2'-deoxyuridine
  misc_feature (6)..(6): n is 2'-O-methyl-cytidine
  misc_feature (9)..(9): n is 2'-O-methyl-guanosine
  misc_feature (10)..(10): n is 5-[N-(1-naphthylmethyl)carboxyamide]-2'-deoxyuridine
  misc_feature (12)..(12): n is 2'-O-methyl-cytidine
  misc_feature (13)..(14): n is 5-[N-(1-naphthylmethyl)carboxyamide]-2'-deoxyuridine
  misc_feature (15)..(15): n is 2'-O-methyl-guanosine
  misc_feature (16)..(16): n is 5-[N-(1-naphthylmethyl)carboxyamide]-2'-deoxyuridine
  misc_feature (17)..(17): n is 2'-O-methyl-adenosine
  misc_feature (18)..(18): n is 2'-O-methyl-guanosine
  misc_feature (21)..(21): n is 5-[N-(1-naphthylmethyl)carboxyamide]-2'-deoxyuridine
  misc_feature (22)..(22): n is 5-[N-(1-naphthylmethyl)carboxyamide]-2'- O-methyl-uridine
  misc_feature (23)..(23): n is 5-[N-(1-naphthylmethyl)carboxyamide]-2'-deoxyuridine
  misc_feature (27)..(27): n is 5-[N-(1-naphthylmethyl)carboxyamide]-2'-deoxyuridine
  misc_feature (28)..(29): n is 2'-O-methyl-guanosine
  misc_feature (30)..(31): n is hexaethylene glycol
  misc_feature (35)..(36): n is 5-[N-(1-naphthylmethyl)carboxyamide]-2'-deoxyuridine
  misc_feature (37)..(37): n is 2'-O-methyl-cytidine
  misc_feature (40)..(40): n is 2'-O-methyl-guanosine
  misc_feature (41)..(41): n is 5-[N-(1-naphthylmethyl)carboxyamide]-2'-deoxyuridine
  misc_feature (43)..(43): n is 2'-O-methyl-cytidine
  misc_feature (44)..(45): n is 5-[N-(1-naphthylmethyl)carboxyamide]-2'-deoxyuridine
  misc_feature (46)..(46): n is 2'-O-methyl-guanosine
  misc_feature (47)..(47): n is 5-[N-(1-naphthylmethyl)carboxyamide]-2'-deoxyuridine
  misc_feature (48)..(48): n is 2'-O-methyl-adenosine
  misc_feature (49)..(49): n is 2'-O-methyl-guanosine
  misc_feature (52)..(52): n is 5-[N-(1-naphthylmethyl)carboxyamide]-2'-deoxyuridine
  misc_feature (53)..(53): n is 5-[N-(1-naphthylmethyl)carboxyamide]-2'- O-methyl-uridine
  misc_feature (54)..(54): n is 5-[N-(1-naphthylmethyl)carboxyamide]-2'-deoxyuridine
  misc_feature (58)..(58): n is 5-[N-(1-naphthylmethyl)carboxyamide]-2'-deoxyuridine
  misc_feature (59)..(60): n is 2'-O-methyl-guanosine
ccgnnnaanngnnnnnnngannnaaannnnnccgnnnaanngnnnnnnngannnaaannn

SEQ ID NO: 732 - DNA, 61 bp, Artificial Sequence
  Synthetic
  misc_feature (4)..(5): n is 5-[N-(1-naphthylmethyl)carboxyamide]-2'-deoxyuridine
  misc_feature (6)..(6): n is 2'-O-methyl-cytidine
  misc_feature (9)..(9): n is 2'-O-methyl-guanosine
  misc_feature (10)..(10): n is 5-[N-(1-naphthylmethyl)carboxyamide]-2'-deoxyuridine
  misc_feature (12)..(12): n is 2'-O-methyl-cytidine
  misc_feature (13)..(14): n is 5-[N-(1-naphthylmethyl)carboxyamide]-2'-deoxyuridine
  misc_feature (15)..(15): n is 2'-O-methyl-guanosine
  misc_feature (16)..(16): n is 5-[N-(1-naphthylmethyl)carboxyamide]-2'-deoxyuridine
  misc_feature (17)..(17): n is 2'-O-methyl-adenosine
  misc_feature (18)..(18): n is 2'-O-methyl-guanosine
  misc_feature (21)..(21): n is 5-[N-(1-naphthylmethyl)carboxyamide]-2'-deoxyuridine
  misc_feature (22)..(22): n is 5-[N-(1-naphthylmethyl)carboxyamide]-2'- O-methyl-uridine
  misc_feature (23)..(23): n is 5-[N-(1-naphthylmethyl)carboxyamide]-2'-deoxyuridine
  misc_feature (27)..(27): n is 5-[N-(1-naphthylmethyl)carboxyamide]-2'-deoxyuridine
  misc_feature (28)..(29): n is 2'-O-methyl-guanosine
  misc_feature (30)..(32): n is hexaethylene glycol
  misc_feature (36)..(37): n is 5-[N-(1-naphthylmethyl)carboxyamide]-2'-deoxyuridine
  misc_feature (38)..(38): n is 2'-O-methyl-cytidine
  misc_feature (41)..(41): n is 2'-O-methyl-guanosine
  misc_feature (42)..(42): n is 5-[N-(1-naphthylmethyl)carboxyamide]-2'-deoxyuridine
  misc_feature (44)..(44): n is 2'-O-methyl-cytidine
  misc_feature (45)..(46): n is 5-[N-(1-naphthylmethyl)carboxyamide]-2'-deoxyuridine
  misc_feature (47)..(47): n is 2'-O-methyl-guanosine
  misc_feature (48)..(48): n is 5-[N-(1-naphthylmethyl)carboxyamide]-2'-deoxyuridine
  misc_feature (49)..(49): n is 2'-O-methyl-adenosine
  misc_feature (50)..(50): n is 2'-O-methyl-guanosine
  misc_feature (53)..(53): n is 5-[N-(1-naphthylmethyl)carboxyamide]-2'-deoxyuridine
  misc_feature (54)..(54): n is 5-[N-(1-naphthylmethyl)carboxyamide]-2'- O-methyl-uridine
  misc_feature (55)..(55): n is 5-[N-(1-naphthylmethyl)carboxyamide]-2'-deoxyuridine
  misc_feature (59)..(59): n is 5-[N-(1-naphthylmethyl)carboxyamide]-2'-deoxyuridine
  misc_feature (60)..(61): n is 2'-O-methyl-guanosine
ccgnnnaanngnnnnnnngannnaaannnnnnccgnnnaanngnnnnnnngannnaaannn

SEQ ID NO: 733 - DNA, 62 bp, Artificial Sequence
  Synthetic
  misc_feature (4)..(5): n is 5-[N-(1-naphthylmethyl)carboxyamide]-2'-deoxyuridine
  misc_feature (6)..(6): n is 2'-O-methyl-cytidine
  misc_feature (9)..(9): n is 2'-O-methyl-guanosine
  misc_feature (10)..(10): n is 5-[N-(1-naphthylmethyl)carboxyamide]-2'-deoxyuridine
  misc_feature (12)..(12): n is 2'-O-methyl-cytidine
  misc_feature (13)..(14): n is 5-[N-(1-naphthylmethyl)carboxyamide]-2'-deoxyuridine
  misc_feature (15)..(15): n is 2'-O-methyl-guanosine
  misc_feature (16)..(16): n is 5-[N-(1-naphthylmethyl)carboxyamide]-2'-deoxyuridine
  misc_feature (17)..(17): n is 2'-O-methyl-adenosine
  misc_feature (18)..(18): n is 2'-O-methyl-guanosine
  misc_feature (21)..(21): n is 5-[N-(1-naphthylmethyl)carboxyamide]-2'-deoxyuridine
  misc_feature (22)..(22): n is 5-[N-(1-naphthylmethyl)carboxyamide]-2'- O-methyl-uridine
  misc_feature (23)..(23): n is 5-[N-(1-naphthylmethyl)carboxyamide]-2'-deoxyuridine
  misc_feature (27)..(27): n is 5-[N-(1-naphthylmethyl)carboxyamide]-2'-deoxyuridine
  misc_feature (28)..(29): n is 2'-O-methyl-guanosine
  misc_feature (30)..(33): n is hexaethylene glycol
  misc_feature (37)..(38): n is 5-[N-(1-naphthylmethyl)carboxyamide]-2'-deoxyuridine
  misc_feature (39)..(39): n is 2'-O-methyl-cytidine
  misc_feature (42)..(42): n is 2'-O-methyl-guanosine
  misc_feature (43)..(43): n is 5-[N-(1-naphthylmethyl)carboxyamide]-2'-deoxyuridine
  misc_feature (45)..(45): n is 2'-O-methyl-cytidine
  misc_feature (46)..(47): n is 5-[N-(1-naphthylmethyl)carboxyamide]-2'-deoxyuridine
  misc_feature (48)..(48): n is 2'-O-methyl-guanosine
  misc_feature (49)..(49): n is 5-[N-(1-naphthylmethyl)carboxyamide]-2'-deoxyuridine
  misc_feature (50)..(50): n is 2'-O-methyl-adenosine
  misc_feature (51)..(51): n is 2'-O-methyl-guanosine
  misc_feature (54)..(54): n is 5-[N-(1-naphthylmethyl)carboxyamide]-2'-deoxyuridine
  misc_feature (55)..(55): n is 5-[N-(1-naphthylmethyl)carboxyamide]-2'- O-methyl-uridine
  misc_feature (56)..(56): n is 5-[N-(1-naphthylmethyl)carboxyamide]-2'-deoxyuridine
  misc_feature (60)..(60): n is 5-[N-(1-naphthylmethyl)carboxyamide]-2'-deoxyuridine
  misc_feature (61)..(62): n is 2'-O-methyl-guanosine
ccgnnnaanngnnnnnnngannnaaannnnnnnccgnnnaanngnnnnnnngannnaaannn

SEQ ID NO: 734 - DNA, 63 bp, Artificial Sequence
  Synthetic
  misc_feature (4)..(5): n is 5-[N-(1-naphthylmethyl)carboxyamide]-2'-deoxyuridine
  misc_feature (6)..(6): n is 2'-O-methyl-cytidine
  misc_feature (9)..(9): n is 2'-O-methyl-guanosine
  misc_feature (10)..(10): n is 5-[N-(1-naphthylmethyl)carboxyamide]-2'-deoxyuridine
  misc_feature (12)..(12): n is 2'-O-methyl-cytidine
  misc_feature (13)..(14): n is 5-[N-(1-naphthylmethyl)carboxyamide]-2'-deoxyuridine
  misc_feature (15)..(15): n is 2'-O-methyl-guanosine
  misc_feature (16)..(16): n is 5-[N-(1-naphthylmethyl)carboxyamide]-2'-deoxyuridine
  misc_feature (17)..(17): n is 2'-O-methyl-adenosine
  misc_feature (18)..(18): n is 2'-O-methyl-guanosine
  misc_feature (21)..(21): n is 5-[N-(1-naphthylmethyl)carboxyamide]-2'-deoxyuridine
  misc_feature (22)..(22): n is 5-[N-(1-naphthylmethyl)carboxyamide]-2'- O-methyl-uridine
  misc_feature (23)..(23): n is 5-[N-(1-naphthylmethyl)carboxyamide]-2'-deoxyuridine
  misc_feature (27)..(27): n is 5-[N-(1-naphthylmethyl)carboxyamide]-2'-deoxyuridine
  misc_feature (28)..(29): n is 2'-O-methyl-guanosine
  misc_feature (30)..(34): n is hexaethylene glycol
  misc_feature (38)..(39): n is 5-[N-(1-naphthylmethyl)carboxyamide]-2'-deoxyuridine
  misc_feature (40)..(40): n is 2'-O-methyl-cytidine
  misc_feature (43)..(43): n is 2'-O-methyl-guanosine
  misc_feature (44)..(44): n is 5-[N-(1-naphthylmethyl)carboxyamide]-2'-deoxyuridine
  misc_feature (46)..(46): n is 2'-O-methyl-cytidine
  misc_feature (47)..(48): n is 5-[N-(1-naphthylmethyl)carboxyamide]-2'-deoxyuridine
  misc_feature (49)..(49): n is 2'-O-methyl-guanosine
  misc_feature (50)..(50): n is 5-[N-(1-naphthylmethyl)carboxyamide]-2'-deoxyuridine
  misc_feature (51)..(51): n is 2'-O-methyl-adenosine
  misc_feature (52)..(52): n is 2'-O-methyl-guanosine
  misc_feature (55)..(55): n is 5-[N-(1-naphthylmethyl)carboxyamide]-2'-deoxyuridine
  misc_feature (56)..(56): n is 5-[N-(1-naphthylmethyl)carboxyamide]-2'- O-methyl-uridine
  misc_feature (57)..(57): n is 5-[N-(1-naphthylmethyl)carboxyamide]-2'-deoxyuridine
  misc_feature (61)..(61): n is 5-[N-(1-naphthylmethyl)carboxyamide]-2'-deoxyuridine
  misc_feature (62)..(63): n is 2'-O-methyl-guanosine
ccgnnnaanngnnnnnnngannnaaannnnnnnnccgnnnaanngnnnnnnngannnaaannn

SEQ ID NO: 735 - DNA, 64 bp, Artificial Sequence
  Synthetic
  misc_feature (4)..(5): n is 5-[N-(1-naphthylmethyl)carboxyamide]-2'-deoxyuridine
  misc_feature (6)..(6): n is 2'-O-methyl-cytidine
  misc_feature (9)..(9): n is 2'-O-methyl-guanosine
  misc_feature (10)..(10): n is 5-[N-(1-naphthylmethyl)carboxyamide]-2'-deoxyuridine
  misc_feature (12)..(12): n is 2'-O-methyl-cytidine
  misc_feature (13)..(14): n is 5-[N-(1-naphthylmethyl)carboxyamide]-2'-deoxyuridine
  misc_feature (15)..(15): n is 2'-O-methyl-guanosine
  misc_feature (16)..(16): n is 5-[N-(1-naphthylmethyl)carboxyamide]-2'-deoxyuridine
  misc_feature (17)..(17): n is 2'-O-methyl-adenosine
  misc_feature (18)..(18): n is 2'-O-methyl-guanosine
  misc_feature (21)..(21): n is 5-[N-(1-naphthylmethyl)carboxyamide]-2'-deoxyuridine
  misc_feature (22)..(22): n is 5-[N-(1-naphthylmethyl)carboxyamide]-2'- O-methyl-uridine
  misc_feature (23)..(23): n is 5-[N-(1-naphthylmethyl)carboxyamide]-2'-deoxyuridine
  misc_feature (27)..(27): n is 5-[N-(1-naphthylmethyl)carboxyamide]-2'-deoxyuridine
  misc_feature (28)..(29): n is 2'-O-methyl-guanosine
  misc_feature (30)..(35): n is hexaethylene glycol
  misc_feature (39)..(40): n is 5-[N-(1-naphthylmethyl)carboxyamide]-2'-deoxyuridine
  misc_feature (41)..(41): n is 2'-O-methyl-cytidine
  misc_feature (44)..(44): n is 2'-O-methyl-guanosine
  misc_feature (45)..(45): n is 5-[N-(1-naphthylmethyl)carboxyamide]-2'-deoxyuridine
  misc_feature (47)..(47): n is 2'-O-methyl-cytidine
  misc_feature (48)..(49): n is 5-[N-(1-naphthylmethyl)carboxyamide]-2'-deoxyuridine
  misc_feature (50)..(50): n is 2'-O-methyl-guanosine
  misc_feature (51)..(51): n is 5-[N-(1-naphthylmethyl)carboxyamide]-2'-deoxyuridine
  misc_feature (52)..(52): n is 2'-O-methyl-adenosine
  misc_feature (53)..(53): n is 2'-O-methyl-guanosine
  misc_feature (56)..(56): n is 5-[N-(1-naphthylmethyl)carboxyamide]-2'-deoxyuridine
  misc_feature (57)..(57): n is 5-[N-(1-naphthylmethyl)carboxyamide]-2'- O-methyl-uridine
  misc_feature (58)..(58): n is 5-[N-(1-naphthylmethyl)carboxyamide]-2'-deoxyuridine
  misc_feature (62)..(62): n is 5-[N-(1-naphthylmethyl)carboxyamide]-2'-deoxyuridine
  misc_feature (63)..(64): n is 2'-O-methyl-guanosine
ccgnnnaanngnnnnnnngannnaaannnnnnnnnccgnnnaanngnnnnnnngannnaaannn

SEQ ID NO: 736 - DNA, 58 bp, Artificial Sequence
  Synthetic
  misc_feature (4)..(5): n is 5-[N-(1-naphthylmethyl)carboxyamide]-2'-deoxyuridine
  misc_feature (6)..(6): n is 2'-O-methyl-cytidine
  misc_feature (9)..(9): n is 2'-O-methyl-guanosine
  misc_feature (10)..(10): n is 5-[N-(1-naphthylmethyl)carboxyamide]-2'-deoxyuridine
  misc_feature (12)..(12): n is 2'-O-methyl-cytidine
  misc_feature (13)..(14): n is 5-[N-(1-naphthylmethyl)carboxyamide]-2'-deoxyuridine
  misc_feature (15)..(15): n is 2'-O-methyl-guanosine
  misc_feature (16)..(16): n is 5-[N-(1-naphthylmethyl)carboxyamide]-2'-deoxyuridine
  misc_feature (17)..(17): n is 2'-O-methyl-adenosine
  misc_feature (18)..(18): n is 2'-O-methyl-guanosine
  misc_feature (21)..(21): n is 5-[N-(1-naphthylmethyl)carboxyamide]-2'-deoxyuridine
  misc_feature (22)..(22): n is 5-[N-(1-naphthylmethyl)carboxyamide]-2'- O-methyl-uridine
  misc_feature (23)..(23): n is 5-[N-(1-naphthylmethyl)carboxyamide]-2'-deoxyuridine
  misc_feature (27)..(27): n is 5-[N-(1-naphthylmethyl)carboxyamide]-2'-deoxyuridine
  misc_feature (28)..(31): n is 2'-O-methyl-guanosine
  misc_feature (32)..(32): n is 5-[N-(1-naphthylmethyl)carboxyamide]-2'-deoxyuridine
  misc_feature (36)..(36): n is 5-[N-(1-naphthylmethyl)carboxyamide]-2'-deoxyuridine
  misc_feature (37)..(37): n is 5-[N-(1-naphthylmethyl)carboxyamide]-2'- O-methyl-uridine
  misc_feature (38)..(38): n is 5-[N-(1-naphthylmethyl)carboxyamide]-2'-deoxyuridine
  misc_feature (41)..(41): n is 2'-O-methyl-guanosine
  misc_feature (42)..(42): n is 2'-O-methyl-adenosine
  misc_feature (43)..(43): n is 5-[N-(1-naphthylmethyl)carboxyamide]-2'-deoxyuridine
  misc_feature (44)..(44): n is 2'-O-methyl-guanosine
  misc_feature (45)..(46): n is 5-[N-(1-naphthylmethyl)carboxyamide]-2'-deoxyuridine
  misc_feature (47)..(47): n is 2'-O-methyl-cytidine
  misc_feature (49)..(49): n is 5-[N-(1-naphthylmethyl)carboxyamide]-2'-deoxyuridine
  misc_feature (50)..(50): n is 2'-O-methyl-guanosine
  misc_feature (53)..(53): n is 2'-O-methyl-cytidine
  misc_feature (54)..(55): n is 5-[N-(1-naphthylmethyl)carboxyamide]-2'-deoxyuridine
ccgnnnaanngnnnnnnngannnaaannnnnnaaannnagnnnnnnngnnaannngcc

SEQ ID NO: 737 - DNA, 60 bp, Artificial Sequence
  Synthetic
  misc_feature (4)..(5): n is 5-[N-(1-naphthylmethyl)carboxyamide]-2'-deoxyuridine
  misc_feature (6)..(6): n is 2'-O-methyl-cytidine
  misc_feature (9)..(9): n is 2'-O-methyl-guanosine
  misc_feature (10)..(10): n is 5-[N-(1-naphthylmethyl)carboxyamide]-2'-deoxyuridine
  misc_feature (12)..(12): n is 2'-O-methyl-cytidine
  misc_feature (13)..(14): n is 5-[N-(1-naphthylmethyl)carboxyamide]-2'-deoxyuridine
  misc_feature (15)..(15): n is 2'-O-methyl-guanosine
  misc_feature (16)..(16): n is 5-[N-(1-naphthylmethyl)carboxyamide]-2'-deoxyuridine
  misc_feature (17)..(17): n is 2'-O-methyl-adenosine
  misc_feature (18)..(18): n is 2'-O-methyl-guanosine
  misc_feature (21)..(21): n is 5-[N-(1-naphthylmethyl)carboxyamide]-2'-deoxyuridine
  misc_feature (22)..(22): n is 5-[N-(1-naphthylmethyl)carboxyamide]-2'- O-methyl-uridine
  misc_feature (23)..(23): n is 5-[N-(1-naphthylmethyl)carboxyamide]-2'-deoxyuridine
  misc_feature (27)..(27): n is 5-[N-(1-naphthylmethyl)carboxyamide]-2'-deoxyuridine
  misc_feature (28)..(29): n is 2'-O-methyl-guanosine
  misc_feature (30)..(31): n is hexaethylene glycol
  misc_feature (32)..(33): n is 2'-O-methyl-guanosine
  misc_feature (34)..(34): n is 5-[N-(1-naphthylmethyl)carboxyamide]-2'-deoxyuridine
  misc_feature (38)..(38): n is 5-[N-(1-naphthylmethyl)carboxyamide]-2'-deoxyuridine
  misc_feature (39)..(39): n is 5-[N-(1-naphthylmethyl)carboxyamide]-2'- O-methyl-uridine
  misc_feature (40)..(40): n is 5-[N-(1-naphthylmethyl)carboxyamide]-2'-deoxyuridine
  misc_feature (43)..(43): n is 2'-O-methyl-guanosine
  misc_feature (44)..(44): n is 2'-O-methyl-adenosine
  misc_feature (45)..(45): n is 5-[N-(1-naphthylmethyl)carboxyamide]-2'-deoxyuridine
  misc_feature (46)..(46): n is 2'-O-methyl-guanosine
  misc_feature (47)..(48): n is 5-[N-(1-naphthylmethyl)carboxyamide]-2'-deoxyuridine
  misc_feature (49)..(49): n is 2'-O-methyl-cytidine
  misc_feature (51)..(51): n is 5-[N-(1-naphthylmethyl)carboxyamide]-2'-deoxyuridine
  misc_feature (52)..(52): n is 2'-O-methyl-guanosine
  misc_feature (55)..(55): n is 2'-O-methyl-cytidine
  misc_feature (56)..(57): n is 5-[N-(1-naphthylmethyl)carboxyamide]-2'-deoxyuridine
ccgnnnaanngnnnnnnngannnaaannnnnnnnaaannnagnnnnnnngnnaannngcc

SEQ ID NO: 738 - DNA, 62 bp, Artificial Sequence
  Synthetic
  misc_feature (4)..(5): n is 5-[N-(1-naphthylmethyl)carboxyamide]-2'-deoxyuridine
  misc_feature (6)..(6): n is 2'-O-methyl-cytidine
  misc_feature (9)..(9): n is 2'-O-methyl-guanosine
  misc_feature (10)..(10): n is 5-[N-(1-naphthylmethyl)carboxyamide]-2'-deoxyuridine
  misc_feature (12)..(12): n is 2'-O-methyl-cytidine
  misc_feature (13)..(14): n is 5-[N-(1-naphthylmethyl)carboxyamide]-2'-deoxyuridine
  misc_feature (15)..(15): n is 2'-O-methyl-guanosine
  misc_feature (16)..(16): n is 5-[N-(1-naphthylmethyl)carboxyamide]-2'-deoxyuridine
  misc_feature (17)..(17): n is 2'-O-methyl-adenosine
  misc_feature (18)..(18): n is 2'-O-methyl-guanosine
  misc_feature (21)..(21): n is 5-[N-(1-naphthylmethyl)carboxyamide]-2'-deoxyuridine
  misc_feature (22)..(22): n is 5-[N-(1-naphthylmethyl)carboxyamide]-2'- O-methyl-uridine
  misc_feature (23)..(23): n is 5-[N-(1-naphthylmethyl)carboxyamide]-2'-deoxyuridine
  misc_feature (27)..(27): n is 5-[N-(1-naphthylmethyl)carboxyamide]-2'-deoxyuridine
  misc_feature (28)..(29): n is 2'-O-methyl-guanosine
  misc_feature (30)..(33): n is hexaethylene glycol
  misc_feature (34)..(35): n is 2'-O-methyl-guanosine
  misc_feature (36)..(36): n is 5-[N-(1-naphthylmethyl)carboxyamide]-2'-deoxyuridine
  misc_feature (40)..(40): n is 5-[N-(1-naphthylmethyl)carboxyamide]-2'-deoxyuridine
  misc_feature (41)..(41): n is 5-[N-(1-naphthylmethyl)carboxyamide]-2'- O-methyl-uridine
  misc_feature (42)..(42): n is 5-[N-(1-naphthylmethyl)carboxyamide]-2'-deoxyuridine
  misc_feature (45)..(45): n is 2'-O-methyl-guanosine
  misc_feature (46)..(46): n is 2'-O-methyl-adenosine
  misc_feature (47)..(47): n is 5-[N-(1-naphthylmethyl)carboxyamide]-2'-deoxyuridine
  misc_feature (48)..(48): n is 2'-O-methyl-guanosine
  misc_feature (49)..(50): n is 5-[N-(1-naphthylmethyl)carboxyamide]-2'-deoxyuridine
  misc_feature (51)..(51): n is 2'-O-methyl-cytidine
  misc_feature (53)..(53): n is 5-[N-(1-naphthylmethyl)carboxyamide]-2'-deoxyuridine
  misc_feature (54)..(54): n is 2'-O-methyl-guanosine
  misc_feature (57)..(57): n is 2'-O-methyl-cytidine
  misc_feature (58)..(59): n is 5-[N-(1-naphthylmethyl)carboxyamide]-2'-deoxyuridine
ccgnnnaanngnnnnnnngannnaaannnnnnnnnnaaannnagnnnnnnngnnaannngcc

SEQ ID NO: 739 - DNA, 64 bp, Artificial Sequence
  Synthetic
  misc_feature (4)..(5): n is 5-[N-(1-naphthylmethyl)carboxyamide]-2'-deoxyuridine
  misc_feature (6)..(6): n is 2'-O-methyl-cytidine
  misc_feature (9)..(9): n is 2'-O-methyl-guanosine
  misc_feature (10)..(10): n is 5-[N-(1-naphthylmethyl)carboxyamide]-2'-deoxyuridine
  misc_feature (12)..(12): n is 2'-O-methyl-cytidine
  misc_feature (13)..(14): n is 5-[N-(1-naphthylmethyl)carboxyamide]-2'-deoxyuridine
  misc_feature (15)..(15): n is 2'-O-methyl-guanosine
  misc_feature (16)..(16): n is 5-[N-(1-naphthylmethyl)carboxyamide]-2'-deoxyuridine
  misc_feature (17)..(17): n is 2'-O-methyl-adenosine
  misc_feature (18)..(18): n is 2'-O-methyl-guanosine
  misc_feature (21)..(21): n is 5-[N-(1-naphthylmethyl)carboxyamide]-2'-deoxyuridine
  misc_feature (22)..(22): n is 5-[N-(1-naphthylmethyl)carboxyamide]-2'- O-methyl-uridine
  misc_feature (23)..(23): n is 5-[N-(1-naphthylmethyl)carboxyamide]-2'-deoxyuridine
  misc_feature (27)..(27): n is 5-[N-(1-naphthylmethyl)carboxyamide]-2'-deoxyuridine
  misc_feature (28)..(29): n is 2'-O-methyl-guanosine
  misc_feature (30)..(35): n is hexaethylene glycol
  misc_feature (36)..(37): n is 2'-O-methyl-guanosine
  misc_feature (38)..(38): n is 5-[N-(1-naphthylmethyl)carboxyamide]-2'-deoxyuridine
  misc_feature (42)..(42): n is 5-[N-(1-naphthylmethyl)carboxyamide]-2'-deoxyuridine
  misc_feature (43)..(43): n is 5-[N-(1-naphthylmethyl)carboxyamide]-2'- O-methyl-uridine
  misc_feature (44)..(44): n is 5-[N-(1-naphthylmethyl)carboxyamide]-2'-deoxyuridine
  misc_feature (47)..(47): n is 2'-O-methyl-guanosine
  misc_feature (48)..(48): n is 2'-O-methyl-adenosine
  misc_feature (49)..(49): n is 5-[N-(1-naphthylmethyl)carboxyamide]-2'-deoxyuridine
  misc_feature (50)..(50): n is 2'-O-methyl-guanosine
  misc_feature (51)..(52): n is 5-[N-(1-naphthylmethyl)carboxyamide]-2'-deoxyuridine
  misc_feature (53)..(53): n is 2'-O-methyl-cytidine
  misc_feature (55)..(55): n is 5-[N-(1-naphthylmethyl)carboxyamide]-2'-deoxyuridine
  misc_feature (56)..(56): n is 2'-O-methyl-guanosine
  misc_feature (59)..(59): n is 2'-O-methyl-cytidine
  misc_feature (60)..(61): n is 5-[N-(1-naphthylmethyl)carboxyamide]-2'-deoxyuridine
ccgnnnaanngnnnnnnngannnaaannnnnnnnnnnnaaannnagnnnnnnngnnaannngcc

SEQ ID NO: 740 - DNA, 52 bp, Artificial Sequence
  Synthetic
  misc_feature (4)..(5): n is 5-[N-(1-naphthylmethyl)carboxyamide]-2'-deoxyuridine
  misc_feature (10)..(10): n is 5-[N-(1-naphthylmethyl)carboxyamide]-2'-deoxyuridine
  misc_feature (13)..(14): n is 5-[N-(1-naphthylmethyl)carboxyamide]-2'-deoxyuridine
  misc_feature (15)..(15): n is 1,3-propane diol
  misc_feature (16)..(16): n is 5-[N-(1-naphthylmethyl)carboxyamide]-2'-deoxyuridine
  misc_feature (18)..(18): n is 1,3-propane diol
  misc_feature (21)..(23): n is 5-[N-(1-naphthylmethyl)carboxyamide]-2'-deoxyuridine
  misc_feature (27)..(27): n is 5-[N-(1-naphthylmethyl)carboxyamide]-2'-deoxyuridine
  misc_feature (30)..(31): n is 5-(N-benzylcarboxyamide)-2'-deoxyuridine
  misc_feature (32)..(32): n is 2'-O-methyl-adenosine
  misc_feature (34)..(34): n is hexaethylene glycol
  misc_feature (36)..(37): n is 5-(N-benzylcarboxyamide)-2'-deoxyuridine
  misc_feature (40)..(40): n is 2'-O-methyl-adenosine
  misc_feature (41)..(41): n is 2'-O-methyl-cytidine
  misc_feature (45)..(47): n is 5-(N-benzylcarboxyamide)-2'-deoxyuridine
  misc_feature (48)..(48): n is 2'-O-methyl-adenosine
  misc_feature (49)..(49): n is 5-(N-benzylcarboxyamide)-2'-deoxyuridine
  misc_feature (50)..(50): n is 2'-O-methyl-adenosine
ccgnncaagngcnnnnangannnaaanggnnncngnnacnngcgnnnnnngc

SEQ ID NO: 741 - DNA, 53 bp, Artificial Sequence
  Synthetic
  misc_feature (4)..(5): n is 5-[N-(1-naphthylmethyl)carboxyamide]-2'-deoxyuridine
  misc_feature (10)..(10): n is 5-[N-(1-naphthylmethyl)carboxyamide]-2'-deoxyuridine
  misc_feature (13)..(14): n is 5-[N-(1-naphthylmethyl)carboxyamide]-2'-deoxyuridine
  misc_feature (15)..(15): n is 1,3-propane diol
  misc_feature (16)..(16): n is 5-[N-(1-naphthylmethyl)carboxyamide]-2'-deoxyuridine
  misc_feature (18)..(18): n is 1,3-propane diol
  misc_feature (21)..(23): n is 5-[N-(1-naphthylmethyl)carboxyamide]-2'-deoxyuridine
  misc_feature (27)..(27): n is 5-[N-(1-naphthylmethyl)carboxyamide]-2'-deoxyuridine
  misc_feature (30)..(30): n is hexaethylene glycol
  misc_feature (31)..(32): n is 5-(N-benzylcarboxyamide)-2'-deoxyuridine
  misc_feature (33)..(33): n is 2'-O-methyl-adenosine
  misc_feature (35)..(35): n is hexaethylene glycol
  misc_feature (37)..(38): n is 5-(N-benzylcarboxyamide)-2'-deoxyuridine
  misc_feature (41)..(41): n is 2'-O-methyl-adenosine
  misc_feature (42)..(42): n is 2'-O-methyl-cytidine
  misc_feature (46)..(48): n is 5-(N-benzylcarboxyamide)-2'-deoxyuridine
  misc_feature (49)..(49): n is 2'-O-methyl-adenosine
  misc_feature (50)..(50): n is 5-(N-benzylcarboxyamide)-2'-deoxyuridine
  misc_feature (51)..(51): n is 2'-O-methyl-adenosine
ccgnncaagngcnnnnangannnaaanggnnnncngnnacnngcgnnnnnngc

SEQ ID NO: 742 - DNA, 54 bp, Artificial Sequence
  Synthetic
  misc_feature (4)..(5): n is 5-[N-(1-naphthylmethyl)carboxyamide]-2'-deoxyuridine
  misc_feature (10)..(10): n is 5-[N-(1-naphthylmethyl)carboxyamide]-2'-deoxyuridine
  misc_feature (13)..(14): n is 5-[N-(1-naphthylmethyl)carboxyamide]-2'-deoxyuridine
  misc_feature (15)..(15): n is 1,3-propane diol
  misc_feature (16)..(16): n is 5-[N-(1-naphthylmethyl)carboxyamide]-2'-deoxyuridine
  misc_feature (18)..(18): n is 1,3-propane diol
  misc_feature (21)..(23): n is 5-[N-(1-naphthylmethyl)carboxyamide]-2'-deoxyuridine
  misc_feature (27)..(27): n is 5-[N-(1-naphthylmethyl)carboxyamide]-2'-deoxyuridine
  misc_feature (30)..(31): n is hexaethylene glycol
  misc_feature (32)..(33): n is 5-(N-benzylcarboxyamide)-2'-deoxyuridine
  misc_feature (34)..(34): n is 2'-O-methyl-adenosine
  misc_feature (36)..(36): n is hexaethylene glycol
  misc_feature (38)..(39): n is 5-(N-benzylcarboxyamide)-2'-deoxyuridine
  misc_feature (42)..(42): n is 2'-O-methyl-adenosine
  misc_feature (43)..(43): n is 2'-O-methyl-cytidine
  misc_feature (47)..(49): n is 5-(N-benzylcarboxyamide)-2'-deoxyuridine
  misc_feature (50)..(50): n is 2'-O-methyl-adenosine
  misc_feature (51)..(51): n is 5-(N-benzylcarboxyamide)-2'-deoxyuridine
  misc_feature (52)..(52): n is 2'-O-methyl-adenosine
ccgnncaagngcnnnnangannnaaanggnnnnncngnnacnngcgnnnnnngc

SEQ ID NO: 743 - DNA, 55 bp, Artificial Sequence
  Synthetic
  misc_feature (4)..(5): n is 5-[N-(1-naphthylmethyl)carboxyamide]-2'-deoxyuridine
  misc_feature (10)..(10): n is 5-[N-(1-naphthylmethyl)carboxyamide]-2'-deoxyuridine
  misc_feature (13)..(14): n is 5-[N-(1-naphthylmethyl)carboxyamide]-2'-deoxyuridine
  misc_feature (15)..(15): n is 1,3-propane diol
  misc_feature (16)..(16): n is 5-[N-(1-naphthylmethyl)carboxyamide]-2'-deoxyuridine
  misc_feature (18)..(18): n is 1,3-propane diol
  misc_feature (21)..(23): n is 5-[N-(1-naphthylmethyl)carboxyamide]-2'-deoxyuridine
  misc_feature (27)..(27): n is 5-[N-(1-naphthylmethyl)carboxyamide]-2'-deoxyuridine
  misc_feature (30)..(32): n is hexaethylene glycol
  misc_feature (33)..(34): n is 5-(N-benzylcarboxyamide)-2'-deoxyuridine
  misc_feature (35)..(35): n is 2'-O-methyl-adenosine
  misc_feature (37)..(37): n is hexaethylene glycol
  misc_feature (39)..(40): n is 5-(N-benzylcarboxyamide)-2'-deoxyuridine
  misc_feature (43)..(43): n is 2'-O-methyl-adenosine
  misc_feature (44)..(44): n is 2'-O-methyl-cytidine
  misc_feature (48)..(50): n is 5-(N-benzylcarboxyamide)-2'-deoxyuridine
  misc_feature (51)..(51): n is 2'-O-methyl-adenosine
  misc_feature (52)..(52): n is 5-(N-benzylcarboxyamide)-2'-deoxyuridine
  misc_feature (53)..(53): n is 2'-O-methyl-adenosine
ccgnncaagngcnnnnangannnaaanggnnnnnncngnnacnngcgnnnnnngc

SEQ ID NO: 744 - DNA, 52 bp, Artificial Sequence
  Synthetic
  misc_feature (1)..(2): n is 5-(N-benzylcarboxyamide)-2'-deoxyuridine
  misc_feature (3)..(3): n is 2'-O-methyl-adenosine
  misc_feature (5)..(5): n is hexaethylene glycol
  misc_feature (7)..(8): n is 5-(N-benzylcarboxyamide)-2'-deoxyuridine
  misc_feature (11)..(11): n is 2'-O-methyl-adenosine
  misc_feature (12)..(12): n is 2'-O-methyl-cytidine
  misc_feature (16)..(18): n is 5-(N-benzylcarboxyamide)-2'-deoxyuridine
  misc_feature (19)..(19): n is 2'-O-methyl-adenosine
  misc_feature (20)..(20): n is 5-(N-benzylcarboxyamide)-2'-deoxyuridine
  misc_feature (21)..(21): n is 2'-O-methyl-adenosine
  misc_feature (24)..(24): n is 2'-O-methyl-guanosine
  misc_feature (28)..(29): n is 5-[N-(1-naphthylmethyl)carboxyamide]-2'-deoxyuridine
  misc_feature (34)..(34): n is 5-[N-(1-naphthylmethyl)carboxyamide]-2'-deoxyuridine
  misc_feature (37)..(38): n is 5-[N-(1-naphthylmethyl)carboxyamide]-2'-deoxyuridine
  misc_feature (39)..(39): n is 1,3-propane diol
  misc_feature (40)..(40): n is 5-[N-(1-naphthylmethyl)carboxyamide]-2'-deoxyuridine
  misc_feature (42)..(42): n is 1,3-propane diol
  misc_feature (45)..(47): n is 5-[N-(1-naphthylmethyl)carboxyamide]-2'-deoxyuridine
  misc_feature (51)..(51): n is 5-[N-(1-naphthylmethyl)carboxyamide]-2'-deoxyuridine
nnncngnnacnngcgnnnnnngcnccgnncaagngcnnnnangannnaaang

SEQ ID NO: 745 - DNA, 53 bp, Artificial Sequence
  Synthetic
  misc_feature (1)..(2): n is 5-(N-benzylcarboxyamide)-2'-deoxyuridine
  misc_feature (3)..(3): n is 2'-O-methyl-adenosine
  misc_feature (5)..(5): n is hexaethylene glycol
  misc_feature (7)..(8): n is 5-(N-benzylcarboxyamide)-2'-deoxyuridine
  misc_feature (11)..(11): n is 2'-O-methyl-adenosine
  misc_feature (12)..(12): n is 2'-O-methyl-cytidine
  misc_feature (16)..(18): n is 5-(N-benzylcarboxyamide)-2'-deoxyuridine
  misc_feature (19)..(19): n is 2'-O-methyl-adenosine
  misc_feature (20)..(20): n is 5-(N-benzylcarboxyamide)-2'-deoxyuridine
  misc_feature (21)..(21): n is 2'-O-methyl-adenosine
  misc_feature (24)..(24): n is 2'-O-methyl-guanosine
  misc_feature (25)..(25): n is hexaethylene glycol
  misc_feature (29)..(30): n is 5-[N-(1-naphthylmethyl)carboxyamide]-2'-deoxyuridine
  misc_feature (35)..(35): n is 5-[N-(1-naphthylmethyl)carboxyamide]-2'-deoxyuridine
  misc_feature (38)..(39): n is 5-[N-(1-naphthylmethyl)carboxyamide]-2'-deoxyuridine
  misc_feature (40)..(40): n is 1,3-propane diol
  misc_feature (41)..(41): n is 5-[N-(1-naphthylmethyl)carboxyamide]-2'-deoxyuridine
  misc_feature (43)..(43): n is 1,3-propane diol
  misc_feature (46)..(48): n is 5-[N-(1-naphthylmethyl)carboxyamide]-2'-deoxyuridine
  misc_feature (52)..(52): n is 5-[N-(1-naphthylmethyl)carboxyamide]-2'-deoxyuridine
nnncngnnacnngcgnnnnnngcnnccgnncaagngcnnnnangannnaaang

SEQ ID NO: 746 - DNA, 54 bp, Artificial Sequence
  Synthetic
  misc_feature (1)..(2): n is 5-(N-benzylcarboxyamide)-2'-deoxyuridine
  misc_feature (3)..(3): n is 2'-O-methyl-adenosine
  misc_feature (5)..(5): n is hexaethylene glycol
  misc_feature (7)..(8): n is 5-(N-benzylcarboxyamide)-2'-deoxyuridine
  misc_feature (11)..(11): n is 2'-O-methyl-adenosine
  misc_feature (12)..(12): n is 2'-O-methyl-cytidine
  misc_feature (16)..(18): n is 5-(N-benzylcarboxyamide)-2'-deoxyuridine
  misc_feature (19)..(19): n is 2'-O-methyl-adenosine
  misc_feature (20)..(20): n is 5-(N-benzylcarboxyamide)-2'-deoxyuridine
  misc_feature (21)..(21): n is 2'-O-methyl-adenosine
  misc_feature (24)..(24): n is 2'-O-methyl-guanosine
  misc_feature (25)..(26): n is hexaethylene glycol
  misc_feature (30)..(31): n is 5-[N-(1-naphthylmethyl)carboxyamide]-2'-deoxyuridine
  misc_feature (36)..(36): n is 5-[N-(1-naphthylmethyl)carboxyamide]-2'-deoxyuridine
  misc_feature (39)..(40): n is 5-[N-(1-naphthylmethyl)carboxyamide]-2'-deoxyuridine
  misc_feature (41)..(41): n is 1,3-propane diol
  misc_feature (42)..(42): n is 5-[N-(1-naphthylmethyl)carboxyamide]-2'-deoxyuridine
  misc_feature (44)..(44): n is 1,3-propane diol
  misc_feature (47)..(49): n is 5-[N-(1-naphthylmethyl)carboxyamide]-2'-deoxyuridine
  misc_feature (53)..(53): n is 5-[N-(1-naphthylmethyl)carboxyamide]-2'-deoxyuridine
nnncngnnacnngcgnnnnnngcnnnccgnncaagngcnnnnangannnaaang

SEQ ID NO: 747 - DNA, 55 bp, Artificial Sequence
  Synthetic
  misc_feature (1)..(2): n is 5-(N-benzylcarboxyamide)-2'-deoxyuridine
  misc_feature (3)..(3): n is 2'-O-methyl-adenosine
  misc_feature (5)..(5): n is hexaethylene glycol
  misc_feature (7)..(8): n is 5-(N-benzylcarboxyamide)-2'-deoxyuridine
  misc_feature (11)..(11): n is 2'-O-methyl-adenosine
  misc_feature (12)..(12): n is 2'-O-methyl-cytidine
  misc_feature (16)..(18): n is 5-(N-benzylcarboxyamide)-2'-deoxyuridine
  misc_feature (19)..(19): n is 2'-O-methyl-adenosine
  misc_feature (20)..(20): n is 5-(N-benzylcarboxyamide)-2'-deoxyuridine
  misc_feature (21)..(21): n is 2'-O-methyl-adenosine
  misc_feature (24)..(24): n is 2'-O-methyl-guanosine
  misc_feature (25)..(27): n is hexaethylene glycol
  misc_feature (31)..(32): n is 5-[N-(1-naphthylmethyl)carboxyamide]-2'-deoxyuridine
  misc_feature (37)..(37): n is 5-[N-(1-naphthylmethyl)carboxyamide]-2'-deoxyuridine
  misc_feature (40)..(41): n is 5-[N-(1-naphthylmethyl)carboxyamide]-2'-deoxyuridine
  misc_feature (42)..(42): n is 1,3-propane diol
  misc_feature (43)..(43): n is 5-[N-(1-naphthylmethyl)carboxyamide]-2'-deoxyuridine
  misc_feature (45)..(45): n is 1,3-propane diol
  misc_feature (48)..(50): n is 5-[N-(1-naphthylmethyl)carboxyamide]-2'-deoxyuridine
  misc_feature (54)..(54): n is 5-[N-(1-naphthylmethyl)carboxyamide]-2'-deoxyuridine
nnncngnnacnngcgnnnnnngcnnnnccgnncaagngcnnnnangannnaaang

SEQ ID NO: 748 - DNA, 56 bp, Artificial Sequence
  Synthetic
  misc_feature (1)..(1): n is 5-(N-benzylcarboxyamide)-2'-deoxyuridine
  misc_feature (2)..(2): n is 5-[N-(3,4-methylenedioxyphenyl-methyl)carboxyamide]-2'-deoxyuridi ne
  misc_feature (3)..(3): n is 2'-O-methyl-adenosine
  misc_feature (5)..(5): n is hexaethylene glycol
  misc_feature (7)..(7): n is 5-(N-benzylcarboxyamide)-2'-O-methyl-uridine
  misc_feature (8)..(8): n is 5-(N-benzylcarboxyamide)-2'-deoxyuridine
  misc_feature (11)..(11): n is 1,3-propane diol
  misc_feature (12)..(12): n is 2'-O-methyl-cytidine
  misc_feature (16)..(17): n is 5-(N-benzylcarboxyamide)-2'-deoxyuridine
  misc_feature (18)..(18): n is 5-(N-benzylcarboxyamide)-2'-O-methyl-uridine
  misc_feature (19)..(19): n is 2'-O-methyl-adenosine
  misc_feature (20)..(20): n is 5-(N-benzylcarboxyamide)-2'-deoxyuridine
  misc_feature (21)..(21): n is 2'-O-methyl-adenosine
  misc_feature (24)..(24): n is 2'-O-methyl-guanosine
  misc_feature (25)..(27): n is hexaethylene glycol
  misc_feature (31)..(32): n is 5-[N-(1-naphthylmethyl)carboxyamide]-2'-deoxyuridine
  misc_feature (33)..(33): n is 2'-O-methyl-cytidine
  misc_feature (36)..(36): n is 2'-O-methyl-guanosine
  misc_feature (37)..(37): n is 5-[N-(1-naphthylmethyl)carboxyamide]-2'-deoxyuridine
  misc_feature (39)..(39): n is 2'-O-methyl-cytidine
  misc_feature (40)..(41): n is 5-[N-(1-naphthylmethyl)carboxyamide]-2'-deoxyuridine
  misc_feature (42)..(42): n is 2'-O-methyl-guanosine
  misc_feature (43)..(43): n is 5-[N-(1-naphthylmethyl)carboxyamide]-2'-deoxyuridine
  misc_feature (44)..(44): n is 2'-O-methyl-adenosine
  misc_feature (45)..(45): n is 2'-O-methyl-guanosine
  misc_feature (48)..(48): n is 5-[N-(1-naphthylmethyl)carboxyamide]-2'-deoxyuridine
  misc_feature (49)..(49): n is 5-[N-(1-naphthylmethyl)carboxyamide]-2'- O-methyl-uridine
  misc_feature (50)..(50): n is 5-[N-(1-naphthylmethyl)carboxyamide]-2'-deoxyuridine
  misc_feature (54)..(54): n is 5-[N-(1-naphthylmethyl)carboxyamide]-2'-deoxyuridine
  misc_feature (55)..(56): n is 2'-O-methyl-guanosine
nnncngnnacnngcgnnnnnngcnnnnccgnnnaanngnnnnnnngannnaaannn

SEQ ID NO: 749 - DNA, 56 bp, Artificial Sequence
  Synthetic
  misc_feature (4)..(5): n is 5-[N-(1-naphthylmethyl)carboxyamide]-2'-deoxyuridine
  misc_feature (6)..(6): n is 2'-O-methyl-cytidine
  misc_feature (9)..(9): n is 2'-O-methyl-guanosine
  misc_feature (10)..(10): n is 5-[N-(1-naphthylmethyl)carboxyamide]-2'-deoxyuridine
  misc_feature (12)..(12): n is 2'-O-methyl-cytidine
  misc_feature (13)..(14): n is 5-[N-(1-naphthylmethyl)carboxyamide]-2'-deoxyuridine
  misc_feature (15)..(15): n is 2'-O-methyl-guanosine
  misc_feature (16)..(16): n is 5-[N-(1-naphthylmethyl)carboxyamide]-2'-deoxyuridine
  misc_feature (17)..(17): n is 2'-O-methyl-adenosine
  misc_feature (18)..(18): n is 2'-O-methyl-guanosine
  misc_feature (21)..(21): n is 5-[N-(1-naphthylmethyl)carboxyamide]-2'-deoxyuridine
  misc_feature (22)..(22): n is 5-[N-(1-naphthylmethyl)carboxyamide]-2'- O-methyl-uridine
  misc_feature (23)..(23): n is 5-[N-(1-naphthylmethyl)carboxyamide]-2'-deoxyuridine
  misc_feature (27)..(27): n is 5-[N-(1-naphthylmethyl)carboxyamide]-2'-deoxyuridine
  misc_feature (28)..(29): n is 2'-O-methyl-guanosine
  misc_feature (30)..(35): n is hexaethylene glycol
  misc_feature (44)..(44): n is 5-[N-(1-naphthylmethyl)carboxyamide]-2'-deoxyuridine
  misc_feature (46)..(46): n is 5-[N-(1-naphthylmethyl)carboxyamide]-2'-deoxyuridine
  misc_feature (48)..(48): n is 5-[N-(1-naphthylmethyl)carboxyamide]-2'-deoxyuridine
  misc_feature (54)..(54): n is 5-[N-(1-naphthylmethyl)carboxyamide]-2'-deoxyuridine
  misc_feature (56)..(56): n is 5-[N-(1-naphthylmethyl)carboxyamide]-2'-deoxyuridine
ccgnnnaanngnnnnnnngannnaaannnnnnnnncgacagcangnangcacancn

SEQ ID NO: 750 - DNA, 55 bp, Artificial Sequence
  Synthetic
  misc_feature (4)..(5): n is 5-[N-(1-naphthylmethyl)carboxyamide]-2'-deoxyuridine
  misc_feature (6)..(6): n is 2'-O-methyl-cytidine
  misc_feature (9)..(9): n is 2'-O-methyl-guanosine
  misc_feature (10)..(10): n is 5-[N-(1-naphthylmethyl)carboxyamide]-2'-deoxyuridine
  misc_feature (12)..(12): n is 2'-O-methyl-cytidine
  misc_feature (13)..(14): n is 5-[N-(1-naphthylmethyl)carboxyamide]-2'-deoxyuridine
  misc_feature (15)..(15): n is 2'-O-methyl-guanosine
  misc_feature (16)..(16): n is 5-[N-(1-naphthylmethyl)carboxyamide]-2'-deoxyuridine
  misc_feature (17)..(17): n is 2'-O-methyl-adenosine
  misc_feature (18)..(18): n is 2'-O-methyl-guanosine
  misc_feature (21)..(21): n is 5-[N-(1-naphthylmethyl)carboxyamide]-2'-deoxyuridine
  misc_feature (22)..(22): n is 5-[N-(1-naphthylmethyl)carboxyamide]-2'- O-methyl-uridine
  misc_feature (23)..(23): n is 5-[N-(1-naphthylmethyl)carboxyamide]-2'-deoxyuridine
  misc_feature (27)..(27): n is 5-[N-(1-naphthylmethyl)carboxyamide]-2'-deoxyuridine
  misc_feature (28)..(29): n is 2'-O-methyl-guanosine
  misc_feature (30)..(34): n is hexaethylene glycol
  misc_feature (43)..(43): n is 5-[N-(1-naphthylmethyl)carboxyamide]-2'-deoxyuridine
  misc_feature (45)..(45): n is 5-[N-(1-naphthylmethyl)carboxyamide]-2'-deoxyuridine
  misc_feature (47)..(47): n is 5-[N-(1-naphthylmethyl)carboxyamide]-2'-deoxyuridine
  misc_feature (53)..(53): n is 5-[N-(1-naphthylmethyl)carboxyamide]-2'-deoxyuridine
  misc_feature (55)..(55): n is 5-[N-(1-naphthylmethyl)carboxyamide]-2'-deoxyuridine
ccgnnnaanngnnnnnnngannnaaannnnnnnncgacagcangnangcacancn

SEQ ID NO: 751 - DNA, 54 bp, Artificial Sequence
  Synthetic
  misc_feature (4)..(5): n is 5-[N-(1-naphthylmethyl)carboxyamide]-2'-deoxyuridine
  misc_feature (6)..(6): n is 2'-O-methyl-cytidine
  misc_feature (9)..(9): n is 2'-O-methyl-guanosine
  misc_feature (10)..(10): n is 5-[N-(1-naphthylmethyl)carboxyamide]-2'-deoxyuridine
  misc_feature (12)..(12): n is 2'-O-methyl-cytidine
  misc_feature (13)..(14): n is 5-[N-(1-naphthylmethyl)carboxyamide]-2'-deoxyuridine
  misc_feature (15)..(15): n is 2'-O-methyl-guanosine
  misc_feature (16)..(16): n is 5-[N-(1-naphthylmethyl)carboxyamide]-2'-deoxyuridine
  misc_feature (17)..(17): n is 2'-O-methyl-adenosine
  misc_feature (18)..(18): n is 2'-O-methyl-guanosine
  misc_feature (21)..(21): n is 5-[N-(1-naphthylmethyl)carboxyamide]-2'-deoxyuridine
  misc_feature (22)..(22): n is 5-[N-(1-naphthylmethyl)carboxyamide]-2'- O-methyl-uridine
  misc_feature (23)..(23): n is 5-[N-(1-naphthylmethyl)carboxyamide]-2'-deoxyuridine
  misc_feature (27)..(27): n is 5-[N-(1-naphthylmethyl)carboxyamide]-2'-deoxyuridine
  misc_feature (28)..(29): n is 2'-O-methyl-guanosine
  misc_feature (30)..(33): n is hexaethylene glycol
  misc_feature (42)..(42): n is 5-[N-(1-naphthylmethyl)carboxyamide]-2'-deoxyuridine
  misc_feature (44)..(44): n is 5-[N-(1-naphthylmethyl)carboxyamide]-2'-deoxyuridine
  misc_feature (46)..(46): n is 5-[N-(1-naphthylmethyl)carboxyamide]-2'-deoxyuridine
  misc_feature (52)..(52): n is 5-[N-(1-naphthylmethyl)carboxyamide]-2'-deoxyuridine
  misc_feature (54)..(54): n is 5-[N-(1-naphthylmethyl)carboxyamide]-2'-deoxyuridine
ccgnnnaanngnnnnnnngannnaaannnnnnncgacagcangnangcacancn

SEQ ID NO: 752 - DNA, 53 bp, Artificial Sequence
  Synthetic
  misc_feature (4)..(5): n is 5-[N-(1-naphthylmethyl)carboxyamide]-2'-deoxyuridine
  misc_feature (6)..(6): n is 2'-O-methyl-cytidine
  misc_feature (9)..(9): n is 2'-O-methyl-guanosine
  misc_feature (10)..(10): n is 5-[N-(1-naphthylmethyl)carboxyamide]-2'-deoxyuridine
  misc_feature (12)..(12): n is 2'-O-methyl-cytidine
  misc_feature (13)..(14): n is 5-[N-(1-naphthylmethyl)carboxyamide]-2'-deoxyuridine
  misc_feature (15)..(15): n is 2'-O-methyl-guanosine
  misc_feature (16)..(16): n is 5-[N-(1-naphthylmethyl)carboxyamide]-2'-deoxyuridine
  misc_feature (17)..(17): n is 2'-O-methyl-adenosine
  misc_feature (18)..(18): n is 2'-O-methyl-guanosine
  misc_feature (21)..(21): n is 5-[N-(1-naphthylmethyl)carboxyamide]-2'-deoxyuridine
  misc_feature (22)..(22): n is 5-[N-(1-naphthylmethyl)carboxyamide]-2'- O-methyl-uridine
  misc_feature (23)..(23): n is 5-[N-(1-naphthylmethyl)carboxyamide]-2'-deoxyuridine
  misc_feature (27)..(27): n is 5-[N-(1-naphthylmethyl)carboxyamide]-2'-deoxyuridine
  misc_feature (28)..(29): n is 2'-O-methyl-guanosine
  misc_feature (30)..(32): n is hexaethylene glycol
  misc_feature (41)..(41): n is 5-[N-(1-naphthylmethyl)carboxyamide]-2'-deoxyuridine
  misc_feature (43)..(43): n is 5-[N-(1-naphthylmethyl)carboxyamide]-2'-deoxyuridine
  misc_feature (45)..(45): n is 5-[N-(1-naphthylmethyl)carboxyamide]-2'-deoxyuridine
  misc_feature (51)..(51): n is 5-[N-(1-naphthylmethyl)carboxyamide]-2'-deoxyuridine
  misc_feature (53)..(53): n is 5-[N-(1-naphthylmethyl)carboxyamide]-2'-deoxyuridine
ccgnnnaanngnnnnnnngannnaaannnnnncgacagcangnangcacancn

SEQ ID NO: 753 - DNA, 52 bp, Artificial Sequence
  Synthetic
  misc_feature (4)..(5): n is 5-[N-(1-naphthylmethyl)carboxyamide]-2'-deoxyuridine
  misc_feature (6)..(6): n is 2'-O-methyl-cytidine
  misc_feature (9)..(9): n is 2'-O-methyl-guanosine
  misc_feature (10)..(10): n is 5-[N-(1-naphthylmethyl)carboxyamide]-2'-deoxyuridine
  misc_feature (12)..(12): n is 2'-O-methyl-cytidine
  misc_feature (13)..(14): n is 5-[N-(1-naphthylmethyl)carboxyamide]-2'-deoxyuridine
  misc_feature (15)..(15): n is 2'-O-methyl-guanosine
  misc_feature (16)..(16): n is 5-[N-(1-naphthylmethyl)carboxyamide]-2'-deoxyuridine
  misc_feature (17)..(17): n is 2'-O-methyl-adenosine
  misc_feature (18)..(18): n is 2'-O-methyl-guanosine
  misc_feature (21)..(21): n is 5-[N-(1-naphthylmethyl)carboxyamide]-2'-deoxyuridine
  misc_feature (22)..(22): n is 5-[N-(1-naphthylmethyl)carboxyamide]-2'- O-methyl-uridine
  misc_feature (23)..(23): n is 5-[N-(1-naphthylmethyl)carboxyamide]-2'-deoxyuridine
  misc_feature (27)..(27): n is 5-[N-(1-naphthylmethyl)carboxyamide]-2'-deoxyuridine
  misc_feature (28)..(29): n is 2'-O-methyl-guanosine
  misc_feature (30)..(31): n is hexaethylene glycol
  misc_feature (40)..(40): n is 5-[N-(1-naphthylmethyl)carboxyamide]-2'-deoxyuridine
  misc_feature (42)..(42): n is 5-[N-(1-naphthylmethyl)carboxyamide]-2'-deoxyuridine
  misc_feature (44)..(44): n is 5-[N-(1-naphthylmethyl)carboxyamide]-2'-deoxyuridine
  misc_feature (50)..(50): n is 5-[N-(1-naphthylmethyl)carboxyamide]-2'-deoxyuridine
  misc_feature (52)..(52): n is 5-[N-(1-naphthylmethyl)carboxyamide]-2'-deoxyuridine
ccgnnnaanngnnnnnnngannnaaannnnncgacagcangnangcacancn

SEQ ID NO: 754 - DNA, 51 bp, Artificial Sequence
  Synthetic
  misc_feature (4)..(5): n is 5-[N-(1-naphthylmethyl)carboxyamide]-2'-deoxyuridine
  misc_feature (6)..(6): n is 2'-O-methyl-cytidine
  misc_feature (9)..(9): n is 2'-O-methyl-guanosine
  misc_feature (10)..(10): n is 5-[N-(1-naphthylmethyl)carboxyamide]-2'-deoxyuridine
  misc_feature (12)..(12): n is 2'-O-methyl-cytidine
  misc_feature (13)..(14): n is 5-[N-(1-naphthylmethyl)carboxyamide]-2'-deoxyuridine
  misc_feature (15)..(15): n is 2'-O-methyl-guanosine
  misc_feature (16)..(16): n is 5-[N-(1-naphthylmethyl)carboxyamide]-2'-deoxyuridine
  misc_feature (17)..(17): n is 2'-O-methyl-adenosine
  misc_feature (18)..(18): n is 2'-O-methyl-guanosine
  misc_feature (21)..(21): n is 5-[N-(1-naphthylmethyl)carboxyamide]-2'-deoxyuridine
  misc_feature (22)..(22): n is 5-[N-(1-naphthylmethyl)carboxyamide]-2'- O-methyl-uridine
  misc_feature (23)..(23): n is 5-[N-(1-naphthylmethyl)carboxyamide]-2'-deoxyuridine
  misc_feature (27)..(27): n is 5-[N-(1-naphthylmethyl)carboxyamide]-2'-deoxyuridine
  misc_feature (28)..(29): n is 2'-O-methyl-guanosine
  misc_feature (30)..(30): n is hexaethylene glycol
  misc_feature (39)..(39): n is 5-[N-(1-naphthylmethyl)carboxyamide]-2'-deoxyuridine
  misc_feature (41)..(41): n is 5-[N-(1-naphthylmethyl)carboxyamide]-2'-deoxyuridine
  misc_feature (43)..(43): n is 5-[N-(1-naphthylmethyl)carboxyamide]-2'-deoxyuridine
  misc_feature (49)..(49): n is 5-[N-(1-naphthylmethyl)carboxyamide]-2'-deoxyuridine
  misc_feature (51)..(51): n is 5-[N-(1-naphthylmethyl)carboxyamide]-2'-deoxyuridine
ccgnnnaanngnnnnnnngannnaaannnncgacagcangnangcacancn

SEQ ID NO: 755 - DNA, 56 bp, Artificial Sequence
  Synthetic
  misc_feature (9)..(9): n is 5-[N-(1-naphthylmethyl)carboxyamide]-2'-deoxyuridine
  misc_feature (11)..(11): n is 5-[N-(1-naphthylmethyl)carboxyamide]-2'-deoxyuridine
  misc_feature (13)..(13): n is 5-[N-(1-naphthylmethyl)carboxyamide]-2'-deoxyuridine
  misc_feature (19)..(19): n is 5-[N-(1-naphthylmethyl)carboxyamide]-2'-deoxyuridine
  misc_feature (21)..(21): n is 5-[N-(1-naphthylmethyl)carboxyamide]-2'-deoxyuridine
  misc_feature (22)..(27): n is hexaethylene glycol
  misc_feature (31)..(32): n is 5-[N-(1-naphthylmethyl)carboxyamide]-2'-deoxyuridine
  misc_feature (33)..(33): n is 2'-O-methyl-cytidine
  misc_feature (36)..(36): n is 2'-O-methyl-guanosine
  misc_feature (37)..(37): n is 5-[N-(1-naphthylmethyl)carboxyamide]-2'-deoxyuridine
  misc_feature (39)..(39): n is 2'-O-methyl-cytidine
  misc_feature (40)..(41): n is 5-[N-(1-naphthylmethyl)carboxyamide]-2'-deoxyuridine
  misc_feature (42)..(42): n is 2'-O-methyl-guanosine
  misc_feature (43)..(43): n is 5-[N-(1-naphthylmethyl)carboxyamide]-2'-deoxyuridine
  misc_feature (44)..(44): n is 2'-O-methyl-adenosine
  misc_feature (45)..(45): n is 2'-O-methyl-guanosine
  misc_feature (48)..(48): n is 5-[N-(1-naphthylmethyl)carboxyamide]-2'-deoxyuridine
  misc_feature (49)..(49): n is 5-[N-(1-naphthylmethyl)carboxyamide]-2'- O-methyl-uridine
  misc_feature (50)..(50): n is 5-[N-(1-naphthylmethyl)carboxyamide]-2'-deoxyuridine
  misc_feature (54)..(54): n is 5-[N-(1-naphthylmethyl)carboxyamide]-2'-deoxyuridine
  misc_feature (55)..(56): n is 2'-O-methyl-guanosine
cgacagcangnangcacancnnnnnnnccgnnnaanngnnnnnnngannnaaannn

SEQ ID NO: 756 - DNA, 55 bp, Artificial Sequence
  Synthetic
  misc_feature (9)..(9): n is 5-[N-(1-naphthylmethyl)carboxyamide]-2'-deoxyuridine
  misc_feature (11)..(11): n is 5-[N-(1-naphthylmethyl)carboxyamide]-2'-deoxyuridine
  misc_feature (13)..(13): n is 5-[N-(1-naphthylmethyl)carboxyamide]-2'-deoxyuridine
  misc_feature (19)..(19): n is 5-[N-(1-naphthylmethyl)carboxyamide]-2'-deoxyuridine
  misc_feature (21)..(21): n is 5-[N-(1-naphthylmethyl)carboxyamide]-2'-deoxyuridine
  misc_feature (22)..(26): n is hexaethylene glycol
  misc_feature (30)..(31): n is 5-[N-(1-naphthylmethyl)carboxyamide]-2'-deoxyuridine
  misc_feature (32)..(32): n is 2'-O-methyl-cytidine
  misc_feature (35)..(35): n is 2'-O-methyl-guanosine
  misc_feature (36)..(36): n is 5-[N-(1-naphthylmethyl)carboxyamide]-2'-deoxyuridine
  misc_feature (38)..(38): n is 2'-O-methyl-cytidine
  misc_feature (39)..(40): n is 5-[N-(1-naphthylmethyl)carboxyamide]-2'-deoxyuridine
  misc_feature (41)..(41): n is 2'-O-methyl-guanosine
  misc_feature (42)..(42): n is 5-[N-(1-naphthylmethyl)carboxyamide]-2'-deoxyuridine
  misc_feature (43)..(43): n is 2'-O-methyl-adenosine
  misc_feature (44)..(44): n is 2'-O-methyl-guanosine
  misc_feature (47)..(47): n is 5-[N-(1-naphthylmethyl)carboxyamide]-2'-deoxyuridine
  misc_feature (48)..(48): n is 5-[N-(1-naphthylmethyl)carboxyamide]-2'- O-methyl-uridine
  misc_feature (49)..(49): n is 5-[N-(1-naphthylmethyl)carboxyamide]-2'-deoxyuridine
  misc_feature (53)..(53): n is 5-[N-(1-naphthylmethyl)carboxyamide]-2'-deoxyuridine
  misc_feature (54)..(55): n is 2'-O-methyl-guanosine
cgacagcangnangcacancnnnnnnccgnnnaanngnnnnnnngannnaaannn

SEQ ID NO: 757 - DNA, 54 bp, Artificial Sequence
  Synthetic
  misc_feature (9)..(9): n is 5-[N-(1-naphthylmethyl)carboxyamide]-2'-deoxyuridine
  misc_feature (11)..(11): n is 5-[N-(1-naphthylmethyl)carboxyamide]-2'-deoxyuridine
  misc_feature (13)..(13): n is 5-[N-(1-naphthylmethyl)carboxyamide]-2'-deoxyuridine
  misc_feature (19)..(19): n is 5-[N-(1-naphthylmethyl)carboxyamide]-2'-deoxyuridine
  misc_feature (21)..(21): n is 5-[N-(1-naphthylmethyl)carboxyamide]-2'-deoxyuridine
  misc_feature (22)..(25): n is hexaethylene glycol
  misc_feature (29)..(30): n is 5-[N-(1-naphthylmethyl)carboxyamide]-2'-deoxyuridine
  misc_feature (31)..(31): n is 2'-O-methyl-cytidine
  misc_feature (34)..(34): n is 2'-O-methyl-guanosine
  misc_feature (35)..(35): n is 5-[N-(1-naphthylmethyl)carboxyamide]-2'-deoxyuridine
  misc_feature (37)..(37): n is 2'-O-methyl-cytidine
  misc_feature (38)..(39): n is 5-[N-(1-naphthylmethyl)carboxyamide]-2'-deoxyuridine
  misc_feature (40)..(40): n is 2'-O-methyl-guanosine
  misc_feature (41)..(41): n is 5-[N-(1-naphthylmethyl)carboxyamide]-2'-deoxyuridine
  misc_feature (42)..(42): n is 2'-O-methyl-adenosine
  misc_feature (43)..(43): n is 2'-O-methyl-guanosine
  misc_feature (46)..(46): n is 5-[N-(1-naphthylmethyl)carboxyamide]-2'-deoxyuridine
  misc_feature (47)..(47): n is 5-[N-(1-naphthylmethyl)carboxyamide]-2'- O-methyl-uridine
  misc_feature (48)..(48): n is 5-[N-(1-naphthylmethyl)carboxyamide]-2'-deoxyuridine
  misc_feature (52)..(52): n is 5-[N-(1-naphthylmethyl)carboxyamide]-2'-deoxyuridine
  misc_feature (53)..(54): n is 2'-O-methyl-guanosine
cgacagcangnangcacancnnnnnccgnnnaanngnnnnnnngannnaaannn

SEQ ID NO: 758 - DNA, 53 bp, Artificial Sequence
  Synthetic
  misc_feature (9)..(9): n is 5-[N-(1-naphthylmethyl)carboxyamide]-2'-deoxyuridine
  misc_feature (11)..(11): n is 5-[N-(1-naphthylmethyl)carboxyamide]-2'-deoxyuridine
  misc_feature (13)..(13): n is 5-[N-(1-naphthylmethyl)carboxyamide]-2'-deoxyuridine
  misc_feature (19)..(19): n is 5-[N-(1-naphthylmethyl)carboxyamide]-2'-deoxyuridine
  misc_feature (21)..(21): n is 5-[N-(1-naphthylmethyl)carboxyamide]-2'-deoxyuridine
  misc_feature (22)..(24): n is hexaethylene glycol
  misc_feature (28)..(29): n is 5-[N-(1-naphthylmethyl)carboxyamide]-2'-deoxyuridine
  misc_feature (30)..(30): n is 2'-O-methyl-cytidine
  misc_feature (33)..(33): n is 2'-O-methyl-guanosine
  misc_feature (34)..(34): n is 5-[N-(1-naphthylmethyl)carboxyamide]-2'-deoxyuridine
  misc_feature (36)..(36): n is 2'-O-methyl-cytidine
  misc_feature (37)..(38): n is 5-[N-(1-naphthylmethyl)carboxyamide]-2'-deoxyuridine
  misc_feature (39)..(39): n is 2'-O-methyl-guanosine
  misc_feature (40)..(40): n is 5-[N-(1-naphthylmethyl)carboxyamide]-2'-deoxyuridine
  misc_feature (41)..(41): n is 2'-O-methyl-adenosine
  misc_feature (42)..(42): n is 2'-O-methyl-guanosine
  misc_feature (45)..(45): n is 5-[N-(1-naphthylmethyl)carboxyamide]-2'-deoxyuridine
  misc_feature (46)..(46): n is 5-[N-(1-naphthylmethyl)carboxyamide]-2'- O-methyl-uridine
  misc_feature (47)..(47): n is 5-[N-(1-naphthylmethyl)carboxyamide]-2'-deoxyuridine
  misc_feature (51)..(51): n is 5-[N-(1-naphthylmethyl)carboxyamide]-2'-deoxyuridine
  misc_feature (52)..(53): n is 2'-O-methyl-guanosine
cgacagcangnangcacancnnnnccgnnnaanngnnnnnnngannnaaannn

SEQ ID NO: 759 - DNA, 52 bp, Artificial Sequence
  Synthetic
  misc_feature (9)..(9): n is 5-[N-(1-naphthylmethyl)carboxyamide]-2'-deoxyuridine
  misc_feature (11)..(11): n is 5-[N-(1-naphthylmethyl)carboxyamide]-2'-deoxyuridine
  misc_feature (13)..(13): n is 5-[N-(1-naphthylmethyl)carboxyamide]-2'-deoxyuridine
  misc_feature (19)..(19): n is 5-[N-(1-naphthylmethyl)carboxyamide]-2'-deoxyuridine
  misc_feature (21)..(21): n is 5-[N-(1-naphthylmethyl)carboxyamide]-2'-deoxyuridine
  misc_feature (22)..(23): n is hexaethylene glycol
  misc_feature (27)..(28): n is 5-[N-(1-naphthylmethyl)carboxyamide]-2'-deoxyuridine
  misc_feature (29)..(29): n is 2'-O-methyl-cytidine
  misc_feature (32)..(32): n is 2'-O-methyl-guanosine
  misc_feature (33)..(33): n is 5-[N-(1-naphthylmethyl)carboxyamide]-2'-deoxyuridine
  misc_feature (35)..(35): n is 2'-O-methyl-cytidine
  misc_feature (36)..(37): n is 5-[N-(1-naphthylmethyl)carboxyamide]-2'-deoxyuridine
  misc_feature (38)..(38): n is 2'-O-methyl-guanosine
  misc_feature (39)..(39): n is 5-[N-(1-naphthylmethyl)carboxyamide]-2'-deoxyuridine
  misc_feature (40)..(40): n is 2'-O-methyl-adenosine
  misc_feature (41)..(41): n is 2'-O-methyl-guanosine
  misc_feature (44)..(44): n is 5-[N-(1-naphthylmethyl)carboxyamide]-2'-deoxyuridine
  misc_feature (45)..(45): n is 5-[N-(1-naphthylmethyl)carboxyamide]-2'- O-methyl-uridine
  misc_feature (46)..(46): n is 5-[N-(1-naphthylmethyl)carboxyamide]-2'-deoxyuridine
  misc_feature (50)..(50): n is 5-[N-(1-naphthylmethyl)carboxyamide]-2'-deoxyuridine
  misc_feature (51)..(52): n is 2'-O-methyl-guanosine
cgacagcangnangcacancnnnccgnnnaanngnnnnnnngannnaaannn

SEQ ID NO: 760 - DNA, 51 bp, Artificial Sequence
  Synthetic
  misc_feature (9)..(9): n is 5-[N-(1-naphthylmethyl)carboxyamide]-2'-deoxyuridine
  misc_feature (11)..(11): n is 5-[N-(1-naphthylmethyl)carboxyamide]-2'-deoxyuridine
  misc_feature (13)..(13): n is 5-[N-(1-naphthylmethyl)carboxyamide]-2'-deoxyuridine
  misc_feature (19)..(19): n is 5-[N-(1-naphthylmethyl)carboxyamide]-2'-deoxyuridine
  misc_feature (21)..(21): n is 5-[N-(1-naphthylmethyl)carboxyamide]-2'-deoxyuridine
  misc_feature (22)..(22): n is hexaethylene glycol
  misc_feature (26)..(27): n is 5-[N-(1-naphthylmethyl)carboxyamide]-2'-deoxyuridine
  misc_feature (28)..(28): n is 2'-O-methyl-cytidine
  misc_feature (31)..(31): n is 2'-O-methyl-guanosine
  misc_feature (32)..(32): n is 5-[N-(1-naphthylmethyl)carboxyamide]-2'-deoxyuridine
  misc_feature (34)..(34): n is 2'-O-methyl-cytidine
  misc_feature (35)..(36): n is 5-[N-(1-naphthylmethyl)carboxyamide]-2'-deoxyuridine
  misc_feature (37)..(37): n is 2'-O-methyl-guanosine
  misc_feature (38)..(38): n is 5-[N-(1-naphthylmethyl)carboxyamide]-2'-deoxyuridine
  misc_feature (39)..(39): n is 2'-O-methyl-adenosine
  misc_feature (40)..(40): n is 2'-O-methyl-guanosine
  misc_feature (43)..(43): n is 5-[N-(1-naphthylmethyl)carboxyamide]-2'-deoxyuridine
  misc_feature (44)..(44): n is 5-[N-(1-naphthylmethyl)carboxyamide]-2'- O-methyl-uridine
  misc_feature (45)..(45): n is 5-[N-(1-naphthylmethyl)carboxyamide]-2'-deoxyuridine
  misc_feature (49)..(49): n is 5-[N-(1-naphthylmethyl)carboxyamide]-2'-deoxyuridine
  misc_feature (50)..(51): n is 2'-O-methyl-guanosine
cgacagcangnangcacancnnccgnnnaanngnnnnnnngannnaaannn

SEQ ID NO: 761 - DNA, 4 bp, Artificial Sequence
  Synthetic
  misc_feature (1)..(1): n is a naturally occurring or modified nucleotide
  misc_feature (2)..(2): n is a modified pyrimidine
nnvs

SEQ ID NO: 762 - DNA, 19 bp, Artificial Sequence
  Synthetic
  misc_feature (1)..(1): n is c or g
  misc_feature (2)..(2): n is c, g or a modified pyrimidine
  misc_feature (3)..(3): n is a modified pyrimidine
  misc_feature (6)..(6): n is a naturally occurring or modified nucleotide
  misc_feature (7)..(7): n is Nm, wherein N is a naturally occurring or modified nucleotide; m is 1 to 20
  misc_feature (11)..(13): n is a modified pyrimidine
  misc_feature (15)..(15): n is a modified pyrimidine
nnnacnngcgnnnanagcg

What is claimed is:

1. An aptamer comprising the sequence: 5′-NZVSLₙS′V′ZACNNₘGCGZZZAZAGCG-3′ (SEQ ID NO: 500),
wherein
V is selected from an A, C or G;
V′ is selected from a C, G or Z, wherein V′ is complementary to V;
S and S′ are independently selected from a C or G, wherein S and S′ are complementary to each other;
N is independently selected from any naturally occurring or modified nucleotide;
Z is independently selected from a modified pyrimidine;
L is a spacer selected from any naturally occurring or modified nucleotide, a hydrocarbon linker, a polyethylene glycol linker or a combination thereof;
n is 0 to 20;
m is 0 to 20; and
wherein one or more nucleotide insertions are optionally included.

2. The aptamer of claim 1, comprising the sequence:
(SEQ ID NO: 501)
5′-ZZVSLₙS′V′ZACNNₘGCGZZZAZAGCG-3′,
wherein
V is selected from an A, C or G;
V′ is selected from a C, G or Z, wherein V′ is complementary to V;
S and S′ are independently selected from a C or G, wherein S and S′ are complementary to each other;
N is independently selected from any naturally occurring or modified nucleotide;
Z is independently selected from a modified pyrimidine;
L is a spacer selected from any naturally occurring or modified nucleotide, a hydrocarbon linker, a polyethylene glycol linker or a combination thereof;
n is 0 to 20;
m is 0 to 20; and
wherein one or more nucleotide insertions are optionally included.

3. The aptamer of claim 1, comprising the sequence:
(SEQ ID NO: 502)
5′-ZZVCLₙGV′ZACNMGCGZZZAZAGCG-3′,
wherein
V is selected from an A, C or G;
V′ is selected from a C, G or Z, wherein V′ is complementary to V;
N is independently selected from any naturally occurring or modified nucleotide;
M is selected from a C or A;
Z is independently selected from a modified pyrimidine;
L is a spacer selected from a substituted or unsubstituted C₂-C₂₀ linker and a modified or unmodified nucleotide; any naturally occurring or modified nucleotide, a hydrocarbon linker, a polyethylene glycol linker or a combination thereof;
n is 0 to 20; and
wherein one or more nucleotide insertions are optionally included.

4. The aptamer of claim 3, comprising the sequence:
(SEQ ID NO: 503)
5′-ZZACLₙGZZACACGCGZZZAZAGCG-3′,
wherein
Z is independently selected from a modified pyrimidine; and
L is a spacer selected from any naturally occurring or modified nucleotide, a hydrocarbon linker, a polyethylene glycol linker or a combination thereof;
n is 0 to 20; and
wherein one or more nucleotide insertions are optionally included.

5. The aptamer of claim 4, comprising the sequence:
(SEQ ID NO: 504)
5′-ZZACGACZACGZZACACGCGZZZAZAGCG-3′,
wherein
Z is independently selected from a modified pyrimidine; and wherein one or more nucleotide insertions are optionally included.

6. An aptamer that specifically binds PDGF, wherein the aptamer comprises at least one modified nucleoside comprising a hydrophobic nucleobase modification, wherein the aptamer binds PDGF with an affinity of less than 10 nM, and wherein the aptamer competes for binding to PDGF with PDGF aptamer 4149-8_{—}260 (SEQ ID NO 211).

7. The aptamer of claim 6, wherein the hydrophobic nucleobase modification is a modified pyrimidine.

8. The aptamer of claim 7, wherein the aptamer comprises at least two, at least three, at least four, at least five, or at least six modified pyrimidines.

9. The aptamer of claim 7 or claim 8, wherein each modified pyrimidine is independently selected from 5-(N-benzylcarboxyamide)-2′-deoxyuridine (BndU), 5-(N-benzylcarboxyamide)-2′-O-methyluridine, 5-(N-benzylcarboxyamide)-2′-fluorouridine, 5-(N-phenethylcarboxyamide)-2′-deoxyuridine (PedU), 5-(N-thiophenylmethylcarboxyamide)-2′-deoxyuridine (ThdU), 5-(N-isobutylcarboxyamide)-2′-deoxyuridine (iBudU), 5-(N-isobutylcarboxyamide)-2′-O-methyluridine, 5-(N-isobutylcarboxyamide)-2′-fluorouridine, 5-(N-tryptaminocarboxyamide)-2′-deoxyuridine (TrpdU), 5-(N-tryptaminocarboxyamide)-2′-O-methyluridine, 5-(N-tryptaminocarboxyamide)-2′-fluorouridine, 5-(N-[1-(3-trimethylamonium) propyl]carboxyamide)-2′-deoxyuridine chloride, 5-(N-naphthylmethylcarboxyamide)-2′-deoxyuridine (NapdU), 5-(N-naphthylmethylcarboxyamide)-2′-O-methyluridine, 5-(N-naphthylmethylcarboxyamide)-2′-fluorouridine, and 5-(N-[1-(2,3-dihydroxypropyl)]carboxyamide)-2′-deoxyuridine).

10. The aptamer of any one of claims 6 to 9, wherein the aptamer comprises the sequence:
(SEQ ID NO: 505)
5′-ZABLₚGYZABK_{q}GCGZZYDYAG-3′,
wherein each Z is, independently, a modified pyrimidine;
each B is independently selected from C and a substituted or unsubstituted C₂-C₁₀ linker;
each L is independently selected from a substituted or unsubstituted C₂-C₁₀ linker, a polyethylene glycol linker, and a modified or unmodified nucleotide, wherein p is 1 to 10;
each Y is independently selected from a modified or unmodified pyrimidine;
each K is independently selected from a substituted or unsubstituted C₂-C₁₀ linker, a polyethylene glycol linker, and a modified or unmodified nucleotide, wherein q is 1 to 5; and
D is selected from A and a substituted or unsubstituted C₂-C₁₀ linker.

11. The aptamer of claim 10, comprising the sequence:
(SEQ ID NO: 506)
5′-XZABLₚGYZABK_{q}GCGZZYDYAGBE-3′,
wherein X is selected from a modified or unmodified pyrimidine and a substituted or unsubstituted C₂-C₁₀ linker, or is absent; and
E is selected from G and a substituted or unsubstituted C₂-C₁₀ linker, or is absent.

12. The aptamer of claim 10 or claim 11, wherein each modified pyrimidine is independently selected from 5-(N-benzylcarboxyamide)-2′-deoxyuridine (BndU), 5-(N-benzylcarboxyamide)-2′-O-methyluridine, 5-(N-benzylcarboxyamide)-2′-fluorouridine, 5-(N-phenethylcarboxyamide)-2′-deoxyuridine (PedU), 5-(N-thiophenylmethylcarboxyamide)-2′-deoxyuridine (ThdU), 5-(N-isobutylcarboxyamide)-2′-deoxyuridine (iBudU), 5-(N-isobutylcarboxyamide)-2′-O-methyluridine, 5-(N-isobutylcarboxyamide)-2′-fluorouridine, 5-(N-tryptaminocarboxyamide)-2′-deoxyuridine (TrpdU), 5-(N-tryptaminocarboxyamide)-2′-O-methyluridine, 5-(N-tryptaminocarboxyamide)-2′-fluorouridine, 5-(N-[1-(3-trimethylamonium) propyl]carboxyamide)-2′-deoxyuridine chloride, 5-(N-naphthylmethylcarboxyamide)-2′-deoxyuridine (NapdU), 5-(N-naphthylmethylcarboxyamide)-2′-O-methyluridine, 5-(N-naphthylmethylcarboxyamide)-2′-fluorouridine, and 5-(N-[1-(2,3-dihydroxypropyl)]carboxyamide)-2′-deoxyuridine).

13. The aptamer of any one of claims 10 to 12, wherein each substituted or unsubstituted C₂-C₁₀ linker is a substituted or unsubstituted C₂-C₈ linker, a substituted or unsubstituted C₂-C₆ linker, a substituted or unsubstituted C₂-C₅ linker, a substituted or unsubstituted C₂-C₄ linker, or a substituted or unsubstituted C₃ linker.

14. The aptamer of any one of claims 10 to 13, wherein at least one L is a polyethylene glycol linker and p is 1, 2, 3, 4, 5 or 6.

15. The aptamer of any one of claims 10 to 14, wherein at least one L is a hexaethylene glycol linker.

16. The aptamer of claim 14 or claim 15, wherein p is 1, 2, or 3.

17. The aptamer of any one of claims 10 to 16, wherein at least one K is a polyethylene glycol linker and q is 1 or 2.

18. The aptamer of any one of claims 10 to 17, wherein at least one K is a hexaethylene glycol linker.

20. 19. The aptamer of any one of claims 10 to 18, wherein q is 1. The aptamer of any one of claims 10 to 18, wherein at least one K is a substituted or unsubstituted C₂-C₁₀ linker and q is 1 or 2.

21. The aptamer of claim 20, wherein the substituted or unsubstituted C₂-C₁₀ linker is a substituted or unsubstituted C₂-C₈ linker, a substituted or unsubstituted C₂-C₆ linker, a substituted or unsubstituted C₂-C₅ linker, a substituted or unsubstituted C₂-C₄ linker, or a substituted or unsubstituted C₃ linker.

22. The aptamer of any one of claims 10 to 21, wherein at least one L is a substituted or unsubstituted C₂-C₁₀ linker and p is 1, 2, 3, 4, 5, 6, 7, or 8.

23. The aptamer of claim 22, wherein the substituted or unsubstituted C₂-C₁₀ linker is a substituted or unsubstituted C₂-C₈ linker, a substituted or unsubstituted C₂-C₆ linker, a substituted or unsubstituted C₂-C₅ linker, a substituted or unsubstituted C₂-C₄ linker, or a substituted or unsubstituted C₃ linker.

24. An aptamer that specifically binds PDGF, wherein the aptamer comprises the sequence:
(SEQ ID NO. 512)
5′-ACALₙZGZAZGLₘZLZ-3′;
wherein each Z is, independently, a modified pyrimidine;
each L is independently selected from a substituted or unsubstituted C₂-C₅₀ linker, a polyethylene glycol linker, and a modified or unmodified nucleotide;
n is 1 to 5; and
m is 1 to 10.

25. The aptamer of claim 24, wherein each Z is independently selected from 5-(N-benzylcarboxyamide)-2′-deoxyuridine (BndU), 5-(N-benzylcarboxyamide)-2′-O-methyluridine, 5-(N-benzylcarboxyamide)-2′-fluorouridine, 5-(N-phenethylcarboxyamide)-2′-deoxyuridine (PedU), 5-(N-thiophenylmethylcarboxyamide)-2′-deoxyuridine (ThdU), 5-(N-isobutylcarboxyamide)-2′-deoxyuridine (iBudU), 5-(N-isobutylcarboxyamide)-2′-O-methyluridine, 5-(N-isobutylcarboxyamide)-2′-fluorouridine, 5-(N-tryptaminocarboxyamide)-2′-deoxyuridine (TrpdU), 5-(N-tryptaminocarboxyamide)-2′-O-methyluridine, 5-(N-tryptaminocarboxyamide)-2′-fluorouridine, 5-(N-[1-(3-trimethylamonium) propyl]carboxyamide)-2′-deoxyuridine chloride, 5-(N-naphthylmethylcarboxyamide)-2′-deoxyuridine (NapdU), 5-(N-naphthylmethylcarboxyamide)-2′-O-methyluridine, 5-(N-naphthylmethylcarboxyamide)-2′-fluorouridine, and 5-(N-[1-(2,3-dihydroxypropyl)]carboxyamide)-2′-deoxyuridine).

26. The aptamer of claim 25, wherein at least one, at least two, at least three, at least four, or each Z is 5-(N-naphthylmethylcarboxyamide)-2′-deoxyuridine (NapdU).

27. The aptamer of any one of claims 24 to 26, wherein n is 1, 2, 3, or 4; and wherein m is 1, 2, 3, 4, 5, 6, 7, 8, or 9.

28. The aptamer of any one of claims 1 to 27, wherein at least one, at least two, at least three, at least four, or at least five nucleosides comprise a 2′-OMe.

29. The aptamer of any one of claims 1 to 28, wherein at least one, at least two, at least three, at least four, or at least five internucleoside linkages are phosphorothioate linkages.

30. The aptamer of any one of claims 1 to 29, wherein the aptamer binds PDGF with an affinity of less than 10 nM, less than 5 nM, less than 2 nM, or less than 1 nM.

31. The aptamer of any one of claims 1 to 30, wherein the aptamer inhibits PDGF-mediated phosphorylation of a PDGF receptor.

32. An aptamer that binds VEGF-121 with an affinity of less than 10 nM, less than 5 nM, less than 2 nM, or less than 1 nM, wherein the aptamer comprises at least one modified nucleoside comprising a hydrophobic nucleobase modification.

33. The aptamer of claim 32, wherein the hydrophobic nucleobase modification is a modified pyrimidine.

34. The aptamer of claim 33, wherein the aptamer comprises at least two, at least three, at least four, at least five, or at least six modified pyrimidines.

35. The aptamer of claim 33 or claim 34, wherein each modified pyrimidine is independently selected from 5-(N-benzylcarboxyamide)-2′-deoxyuridine (BndU), 5-(N-benzylcarboxyamide)-2′-O-methyluridine, 5-(N-benzylcarboxyamide)-2′-fluorouridine, 5-(N-phenethylcarboxyamide)-2′-deoxyuridine (PedU), 5-(N-thiophenylmethylcarboxyamide)-2′-deoxyuridine (ThdU), 5-(N-isobutylcarboxyamide)-2′-deoxyuridine (iBudU), 5-(N-isobutylcarboxyamide)-2′-O-methyluridine, 5-(N-isobutylcarboxyamide)-2′-fluorouridine, 5-(N-tryptaminocarboxyamide)-2′-deoxyuridine (TrpdU), 5-(N-tryptaminocarboxyamide)-2′-O-methyluridine, 5-(N-tryptaminocarboxyamide)-2′-fluorouridine, 5-(N-[1-(3-trimethylamonium) propyl]carboxyamide)-2′-deoxyuridine chloride, 5-(N-naphthylmethylcarboxyamide)-2′-deoxyuridine (NapdU), 5-(N-naphthylmethylcarboxyamide)-2′-O-methyluridine, 5-(N-naphthylmethylcarboxyamide)-2′-fluorouridine, and 5-(N-[1-(2,3-dihydroxypropyl)]carboxyamide)-2′-deoxyuridine).

36. The aptamer of any one of claims 33 to 35, wherein at least one, at least two, at least three, at least four, at least five, or at least six modified pyrimidines are 5-(N-naphthylmethylcarboxyamide)-2′-deoxyuridine (NapdU).

37. The aptamer of any one of claims 32 to 36, wherein the aptamer competes for binding to VEGF-121 with aptamer 4867-31_{—}192.

38. The aptamer of any one of claims 32 to 37, wherein the aptamer comprises the sequence:
5′-GZZQAAEZECZZEZDRGAZZZAAAZG-3′,
wherein each Z is a modified pyrimidine;
Q is selected from any modified or unmodified nucleotide and a substituted or unsubstituted C₂-C₅₀ linker, or is absent;
each E is independently selected from a G and a substituted or unsubstituted C₂-C₅₀ linker;
D is selected from A and a substituted or unsubstituted C₂-C₅₀ linker; and
R is selected from any modified or unmodified nucleotide and a substituted or unsubstituted C₂-C₅₀ linker.

39. The aptamer of claim 37, wherein the aptamer comprises a sequence selected from:
5′-CGZZQAAEZECZZEZDRGAZZZAAAZG-3′;
5′-GZZQAAEZECZZEZDRGAZZZAAAZGG-3′;
5′-CGZZQAAEZECZZEZDRGAZZZAAAZGG-3′;
and
5′-CCGZZQAAEZECZZEZDRGAZZZAAAZGG-3′.

40. The aptamer of claim 37 or claim 38, wherein each Z is independently selected from 5-(N-benzylcarboxyamide)-2′-deoxyuridine (BndU), 5-(N-benzylcarboxyamide)-2′-O-methyluridine, 5-(N-benzylcarboxyamide)-2′-fluorouridine, 5-(N-phenethylcarboxyamide)-2′-deoxyuridine (PedU), 5-(N-thiophenylmethylcarboxyamide)-2′-deoxyuridine (ThdU), 5-(N-isobutylcarboxyamide)-2′-deoxyuridine (iBudU), 5-(N-isobutylcarboxyamide)-2′-O-methyluridine, 5-(N-isobutylcarboxyamide)-2′-fluorouridine, 5-(N-tryptaminocarboxyamide)-2′-deoxyuridine (TrpdU), 5-(N-tryptaminocarboxyamide)-2′-O-methyluridine, 5-(N-tryptaminocarboxyamide)-2′-fluorouridine, 5-(N-[1-(3-trimethylamonium) propyl]carboxyamide)-2′-deoxyuridine chloride, 5-(N-naphthylmethylcarboxyamide)-2′-deoxyuridine (NapdU), 5-(N-naphthylmethylcarboxyamide)-2′-O-methyluridine, 5-(N-naphthylmethylcarboxyamide)-2′-fluorouridine, and 5-(N-[1-(2,3-dihydroxypropyl)]carboxyamide)-2′-deoxyuridine).

41. The aptamer of any one of claims 37 to 39, wherein at least one, at least two, at least three, at least four, at least five, at least six, at least seven, or at least eight Zs are 5-(N-naphthylmethylcarboxyamide)-2′-deoxyuridine (NapdU).

42. The aptamer of any one of claims 37 to 40, wherein each substituted or unsubstituted C₂-C₅₀ linker is independently selected from a substituted or unsubstituted C₂-C₂₀ linker, a substituted or unsubstituted C₂-C₁₀ linker a substituted or unsubstituted C₂-C₈ linker, a substituted or unsubstituted C₂-C₆ linker, a substituted or unsubstituted C₂-C₅ linker, a substituted or unsubstituted C₂-C₄ linker, and a substituted or unsubstituted C₃ linker.

43. The aptamer of claim 42, wherein each substituted or unsubstituted C₂-C₅₀ linker is a substituted or unsubstituted C₂-C₁₀ linker.

44. The aptamer of claim 43, wherein each substituted or unsubstituted C₂-C₁₀ linker is a substituted or unsubstituted C₂-C₈ linker, a substituted or unsubstituted C₂-C₆ linker, a substituted or unsubstituted C₂-C₅ linker, a substituted or unsubstituted C₂-C₄ linker, or a substituted or unsubstituted C₃ linker.

45. The aptamer of any one of claims 32 to 39, wherein at least one, at least two, at least three, at least four, or at least five nucleosides comprise a 2′-OMe.

46. The aptamer of any one of claims 32 to 45, wherein at least one, at least two, at least three, at least four, or at least five internucleoside linkages are phosphorothioate linkages.

47. The aptamer of any one of claims 32 to 46, wherein the aptamer binds VEGF-121 with an affinity of less than 10 nM, less than 5 nM, less than 2 nM, or less than 1 nM.

48. The aptamer of any one of claims 32 to 47, wherein the aptamer inhibits VEGF-121-mediated phosphorylation of a VEGF receptor.

49. An aptamer shown in any of Tables 10 to 14 that binds VEGF-121 with an affinity of less than 10 nM.

50. An aptamer construct comprising a first aptamer selected from an aptamer of any one of claims 1 to 31 and a second aptamer selected from an aptamer of any one of claims 32 to 49.

51. The aptamer construct of claim 50 wherein the first aptamer and the second aptamer are noncovalently linked.

52. The aptamer construct of claim 50 wherein the first aptamer and the second aptamer are covalently linked.

53. The aptamer construct of any one of claims 50 to 52, wherein the aptamer construct is able to bind PDGF and VEGF-121 simultaneously.

54. The aptamer construct of any one of claims 50 to 53, wherein the aptamer construct binds PDGF with an affinity of less than 10 nM.

55. The aptamer construct of any one of claims 50 to 53, wherein the aptamer construct binds VEGF-121 with an affinity of less than 10 nM.

56. An aptamer construct comprising a first aptamer and a second aptamer, wherein the first aptamer and the second aptamer are each independently selected from an aptamer of any one of claims 1 to 31.

57. The aptamer construct of claim 56, wherein the first aptamer and the second aptamer are the same.

58. The aptamer construct of claim 56, wherein the first aptamer and the second aptamer are different.

59. The aptamer construct of any one of claims 56 to 58, wherein the first aptamer and the second aptamer are noncovalently linked.

60. The aptamer construct of any one of claims 56 to 58 wherein the first aptamer and the second aptamer are covalently linked.

61. The aptamer construct of any one of claims 56 to 60, wherein the aptamer construct is able to bind two PDGF monomers simultaneously.

62. The aptamer construct of any one of claims 56 to 61, wherein the aptamer construct binds PDGF with an affinity of less than 10 nM.

63. An aptamer construct comprising a first aptamer and a second aptamer, wherein the first aptamer and the second aptamer are each independently selected from an aptamer of any one of claims 32 to 49.

64. The aptamer construct of claim 63, wherein the first aptamer and the second aptamer are the same.

65. The aptamer construct of claim 63, wherein the first aptamer and the second aptamer are different.

66. The aptamer construct of any one of claims 63 to 65, wherein the first aptamer and the second aptamer are noncovalently linked.

67. The aptamer construct of any one of claims 63 to 65 wherein the first aptamer and the second aptamer are covalently linked.

68. The aptamer construct of any one of claims 63 to 67, wherein the aptamer construct is able to bind two VEGF monomers simultaneously.

69. The aptamer construct of any one of claims 63 to 68, wherein the aptamer construct binds VEGF with an affinity of less than 10 nM.

70. A pharmaceutical composition comprising at least one aptamer of any one of claims 1 to 49 and a pharmaceutically acceptable carrier.

71. The pharmaceutical composition of claim 70, comprising a first aptamer of any one of claims 1 to 31 and a second aptamer of any one of claims 32 to 49.

72. A pharmaceutical composition comprising an aptamer construct of any one of claims 49 to 69 and a pharmaceutically acceptable carrier.

73. The pharmaceutical composition of any one of claims 69 to 72, wherein the pharmaceutical composition is for intravitreal injection.

74. A method of treating macular degeneration comprising administering to a subject with macular degeneration a therapeutically effective amount of the pharmaceutical composition of any one of claims 69 to 72.

75. A method of preventing macular degeneration comprising administering to a subject at risk for developing macular degeneration a therapeutically effective amount of the pharmaceutical composition of any one of claims 69 to 72.

76. A method of treating an ophthalmic condition comprising administering to a subject with an ophthalmic condition a therapeutically effective amount of the pharmaceutical composition of any one of claims 69 to 72.

77. The method of claim 76, wherein the ophthalmic condition is selected from retinitis, macular degeneration, choroiditis, retinopathy, hypertensive retinopathy, diabetic retinopathy, chronic dry eye, AIDS-related vision loss, amblyopia, hemianopia, retinal vein occlusions, trachoma, keratoconus, chorioretinal inflammation, central serous retinopathy, uveitis, retinal dystrophy, edema, glaucoma, and cataract.

78. The method of claim 74 or claim 75, wherein the macular degeneration is age-related macular degeneration.

79. The method of claim 78, wherein the macular degeneration is dry age-related macular degeneration or wet age-related macular degeneration.

80. A method of treating fibrosis comprising administering to a subject with fibrosis a therapeutically effective amount of the pharmaceutical composition of any one of claims 70 to 72.

81. The method of claim 80, wherein the fibrosis is selected from pulmonary fibrosis, renal fibrosis, and cystic fibrosis.

82. A method of treating a cardiovascular disease comprising administering to a subject with the cardiovascular disease a therapeutically effective amount of the pharmaceutical composition of any one of claims 69 to 72.

83. The method of claim 82, wherein the cardiovascular disease is selected from atherosclerosis, restenosis, a cardiac hypertrophy related condition, and a vascular disorder.

84. A method of treating cancer comprising administering to a subject with cancer a therapeutically effective amount of the pharmaceutical composition of any one of claims 69 to 72.

85. The method of claim 84, wherein the cancer is selected from bladder cancer, lung cancer, breast cancer, melanoma, colon and rectal cancer, lymphoma, endometrial cancer, pancreatic cancer, liver cancer, renal cancer, prostate cancer, leukemia, and thyroid cancer
